(19) United States
(12) Patent Application Publication
(10) Pub. No.: US 2023/0123171 A1
(43) Pub. Date: Apr. 20, 2023

(54) DNA RECOMBINASE MEDIATED ASSEMBLY OF DNA LONG ADAPTER SINGLE STRANDED OLIGONUCLEOTIDE (LASSO) PROBES

(71) Applicant: Rutgers, The State University of New Jersey, New Brunswick, NJ (US)

(72) Inventors: Biju Parekkadan, Atlantic Highlands, NJ (US); Lorenzo Tosi, Franklin Park, NJ (US)

(73) Assignee: Rutgers, The State University of New Jersey, New Brunswick, NJ (US)

(21) Appl. No.: 18/046,896

(22) Filed: Oct. 14, 2022

Related U.S. Application Data
(60) Provisional application No. 63/255,509, filed on Oct. 14, 2021.

(51) Int. Cl. C12N 15/10; C12N 15/90

(52) U.S. Cl. CPC C12N 15/102; C12N 15/907; C12N 2800/80

(57) ABSTRACT

Methods of generating mature ssDNA LASSO probes using DNA recombinase mediated assembly are provided. Also provided are mature ssDNA LASSO probes made by the methods, methods of their use, and kits including such.

### CROSS-REFERENCE TO RELATED APPLICATION

[0001] This application claims priority to U.S. Provisional Application No. 63/255,509 filed Oct. 14, 2021, herein incorporated by reference in its entirety.

### ACKNOWLEDGMENT OF GOVERNMENT SUPPORT

[0002] This invention was made with government support under R01GM127353 awarded by The National Institutes of Health. The government has certain rights in the invention.

### REFERENCE TO AN ELECTRONIC SEQUENCE LISTING

[0003] The contents of the electronic sequence listing (sequencelisting.xml; Size: 4,402,907 bytes; and Date of Creation: Oct. 14, 2022) is herein incorporated by reference in its entirety.

### FIELD

[0004] This application provides methods of generating mature ssDNA LASSO probes using DNA recombinase mediated assembly. Also provided are mature ssDNA LASSO probes made by the methods, and kits including such.

### BACKGROUND

[0005] Long-adapter single-strand oligonucleotide (LASSO) probe libraries enable the massively multiplexed capture of kilobase-sized fragments for downstream sequencing or expression. Mature LASSO probes are single stranded DNA (ssDNA) molecules that become circularized by gap filling and ligation after annealing to target sequences that flank a desired DNA fragment. LASSO probes are a useful tool to capture and clone thousands of kilobase-sized DNA fragments in a single reaction, since they exhibit high specificity and can be massively multiplexed (Tosi et al., Nature BME 2017; 1:0092. doi:10.1038/s41551-017-0092). Because of the large size of the DNA targets (up to 5 KB) that can be captured at single nucleotide resolution, the LASSO probe technology is also a tool for long DNA sequence capture for NGS applications.

[0006] Prior LASSO assembly methods (e.g., WO 2016/197065, and FIG. 1B herein) generate DNA side products (such as discordant probes) together with the mature LASSO probes. In addition, LASSO libraries generated from this method contained an unexpectedly large amount of discordant probes resulting from the intermolecular ligation of different LASSO probe precursors during the self-circularization step of the assembly process (Shukor et al., 2019; BMC Biotechnol. 19(1):50), The presence of the discordant probes in the mature LASSO libraries was responsible for a significant reduction of the capture efficiency and the production of undesirable low molecular weight unspecific DNA amplicons in post capture PCR. Moreover, the previous LASSO assembly method used two consecutive PCR steps that introduce several different DNA artifacts in the final LASSO libraries, such as DNA polymerase errors, skewing the distribution of PCR products due to unequal amplification of different probes, probe-probe fusion products, accumulation of primers dimers.

[0007] These drawbacks have limited the use of mature LASSO probe to simple genomes, like bacteria. For highly complex eukaryotic genomes, such as a human genome, a higher capture efficiency and higher purity of the mature LASSO probe library is needed.

[0008] The new methods provided herein address these issues, as the methods avoid the self-circularization step of the previous LASSO assembly process and the initial fusion PCR steps. This results in a pure population of mature LASSO probes with a significant improvement in the capture efficiency.

### SUMMARY

[0009] Provided herein are single stranded (ss) DNA Long Adapter Single Stranded Oligonucleotide (LASSO) probes, methods of making such, and methods of their use. In one example, the DNA LASSO probes include, from 5′ to 3′, (1) a ligation arm sequence complementary to a 5′ region of a target sequence, (2) a backbone sequence that is not complementary to the target sequence, and comprises a recombination site, and (3) an extension arm sequence complementary to a 3′ region of the target sequence, wherein the ligation arm sequence and extension arm sequence are complementary to 5′ and 3′ regions of a single target sequence, respectively. In some examples the ligation arm sequence is at least 20 nucleotides (nt), such as 20-40 nt, 20-50 nt, or 20-80 nt, the backbone sequence is at least 100 nt, such as at least 200, at least 300, at least 350 nt, or at least 400 nt, such as 200 to 2500, 200-500, 200-2000, 200-2500, 200-1500, 200-1000, 200-800 nt, 200-400 nt, 300 to 400 nt, 350 to 450 nt, or 250-300 nt, the extension arm sequence at least 20 nt, such as 20-80 nt or 20-40 nt, or combinations thereof. In some examples, the 5′ and 3′ regions of the target sequence to which the ligation and extension arms hybridize are at least 200 nt apart, such as at least 500, at least 1000, at least 5,000, at least 10,000, at least 20,000, or at least 30,000 nt apart, such as 200-30,000 nt apart on the target sequence. In some examples, the melting temperature (Tm) of the extension arm is 65-70° C. and ligation arm is 70-75° C. In some examples, the Tm of the ligation arm is about 5° C. higher than the extension arm. In some examples, the Tm of the extension arm and the ligation arm are in the same range, such as 65-70° C. for both, or have the same Tm, such as 65° C.

[0010] Compositions that include one or more of the disclosed ssDNA LASSOs probes are also provided, and can include other materials, such as a pharmaceutically acceptable carrier (e.g., water or saline). Kits that include one or more of the disclosed ssDNA LASSOs probes (such as a library of mature ss DNA LASSO probes, such as a custom library or a general purpose library e.g. human oncogene panel) are also provided, and can include other materials, such as and one or more endonucleases, one or more exonucleases, one or more polymerases (such as a DNA polymerase, such as one having low strand displacement, such as Kapa HiFi), one or more ligases, one or more recombinases, one or more reagents for PCR, or combinations thereof. In specific examples, the kit includes one or more of the disclosed ssDNA LASSOs probes (such as a probe library), and one or more of a gap filling mix (e.g., a thermostable DNA ligase, a DNA polymerase [such as one having low strand displacement, such as Kapa HiFi], dNTPs, glycerol, buffer), linear DNA digestion solution (e.g., Exonucleases I, III and Lambda, buffer and glycerol), oligonucleotide primers for post capture PCR reaction, post capture PCR master mix (e.g., DNA polymerase, dNTPs and buffer), and a positive control for the capture reaction (e.g., a LASSO probe that captures 1 kb target sequence within the genome of the phage M13mp18 single stranded DNA, or the LASSO probe and an aliquot of M13mp18 single stranded DNA (New England Biolab N4040S)).

[0011] Also provided are methods of generating the disclosed ssDNA LASSO probes. In some examples, such a method includes providing a double stranded pre-LASSO probe (which can be generated from a ssDNA pre-LASSO probe, such as any of SEQ ID NOS 1-3088, 3090-3093, 3117-3121, and 3126). In some examples, the ssDNA pre-LASSO probe used to generate the double stranded pre-LASSO probe comprises at least 80%, at least 85%, at least 90%, at least 95%, at least 98%, at least 99%, or 100% sequence identity to any of SEQ ID NOS: 1-3088, 3090-3093, 3117-3121 and 3126. The dsDNA pre-LASSO probes include from 5′ to 3′ (i) a first primer annealing site sequence, (ii) an extension arm sequence, (iii) an inverted PCR primer annealing site comprising a restriction site that allows for asymmetric cutting, (iv) a ligation arm sequence, and (v) a second primer annealing site sequence. The ds pre-LASSO probe is contacted with a double stranded linear pLASSO vector comprising from 5′ to 3′ (e.g., “a” in pLASSO 14 FIG. 2A, 2B is the 5′ end) (i) the second primer annealing site sequence (i.e., the second primer annealing site sequence of the pre-LASSO probe), (ii) a first backbone region that does not substantially hybridize to the target sequence, (iii) a first recombination site, (iv) a selectable marker, (v) an origin of replication, (vi) a second recombination site, (vii) a second backbone region that does not substantially hybridize to the target sequence and (viii) the first primer annealing site sequence (i.e., the first primer annealing site sequence of the pre-LASSO probe), wherein the double stranded linear pLASSO vector further includes a nicking endonuclease recognition site (for example in the backbone), a restriction site not in the backbone (for example between the first recombination site and the selectable marker) used to digest a plasmid (e.g., SwaI), and optionally a first restriction endonuclease site (such as SalI) and an optional second restriction endonuclease site (such as BamHI) (wherein the optional first and second restriction endonuclease sites can be used to ensure cloning of a pre-LASSO probe into a linear pLASSO vector was successful; in some examples these are in the backbone region), under conditions to allow annealing, gap filling and ligation of the first and second primer annealing sites of the pre-LASSO probe to the first and second primer annealing sites of the linear pLASSO vector, thereby generating a circular pLASSO vector containing the pre-LASSO probe; introducing the circular pLASSO vector into host cells, thereby generating transformed host cells comprising the circular pLASSO vector; growing the transformed host cells in the presence of a growth media comprising reagents that do not permit growth of the host cells in the absence of the selectable marker; extracting the circular pLASSO vector from the transformed host cells; contacting the extracted circular pLASSO vector with a nicking endonuclease specific for the nicking endonuclease recognition site, under conditions that cleave one nucleic acid strand of the extracted circular pLASSO vector, thereby producing a relaxed circular pLASSO vector; contacting the relaxed circular pLASSO vector with a recombinase specific for the first and second recombination site, under conditions that recombination of the relaxed circular pLASSO vector occurs, thereby generating (i) a plasmid comprising the restriction site (e.g., SwaI in FIG. 1A), a recombination site, the selection marker, and the origin of replication and (ii) a minicircle comprising the double stranded pre-LASSO probe, the first and second backbones, and 50% of each recombination site (e.g., if the recombination sites in pLASSO are AA and BB, after the recombination they become AB and AB); digesting the plasmid with a restriction enzyme (such as SwaI or other restriction enzyme) and exonuclease V; using inverted PCR to linearize the minicircle, using a first primer and a second primer that hybridize to the inverted PCR primer annealing site, wherein the first primer includes a restriction enzyme site (e.g., a Type IIS (shifted cleavage) restriction enzyme, such as BspQI, BsaI, BsmBI, BbsI, Esp3I, BtgZI, BspMI, BsmFI, SapI restriction enzyme site, which recognize an asymmetric DNA sequence and cleaves outside its recognition site located in the inverted PCR primer annealing site 54 and cleaves the 3′-5′(bottom strand) a DNA strand exactly at the 5′ end of the extension arm. while the 5′-3′ DNA strand (top strand) is cut inside the “inverted PCR primer annealing site) and wherein the second primer comprises a 3′-uracil and the three 5′-end nt are modified nucleotides resistant to exonuclease treatment (e.g., connected by phosphorothioate bonds that are resistant to lambda exonuclease treatment, such as 5′ A*T*C*GCCGCAAGAAGTGTU 3′; SEQ ID NO: 3105 thereby generating a linear double stranded minicircle with a 5′ end and 3′ end, wherein the 5′ end of the linear double stranded minicircle is the first primer annealing site at the 3′ end of the linear double stranded minicircle is the second primer annealing site; removing all or part of the first and second primer annealing sites from the 5′ and 3′ end of the linear double stranded minicircle by restriction digestion and/or glycosylase digestion to produce a digested linear double stranded minicircle, and removing one of the two strands of the digested linear double stranded minicircle, thereby producing the ssDNA LASSO probe.

[0012] Also provided are methods of using in the disclosed ssDNA LASSO probes. In some examples, the methods include detecting a target nucleic acid sequence. Such methods can include contacting a sample comprising the target sequence with one or more ssDNA LASSO probes provided herein, wherein the ligation arm sequence and the extension arm sequence are complimentary to a 5′ region of the target sequence and to a 3′ region of the target sequence, respectively; hybridizing the ligation arm sequence and extension arm sequence to the target sequence; gap filling to copy the target sequence between the ligation arm sequence and extension arm sequence using a polymerase (such as a DNA polymerase, such as one having low strand displacement, such as Kapa HiFi), thereby generating a ssDNA circle containing a copy the targeted DNA sequence; ligating the resulting molecule, thereby generating a circular single stranded DNA fragment comprising the target sequence; isolating the circular single-stranded DNA fragment comprising the target sequence (e.g., optionally by digesting linear DNA in the sample, for example by adding directly to the capture reaction an aliquot of “linear DNA digestion solution” containing Exonuclease I, Exonuclease III and Lambda Exonuclease); and amplifying the circular single stranded DNA fragment comprising the target sequences, thereby detecting the target sequences (for example by detecting expected size DNA target sequence amplicons, e.g., using gel electrophoresis or the Bioanalizer). Also provided are libraries of target sequences generated by such a method.

[0013] Also provided are kits that include (a) a double stranded pre-LASSO probe comprising from 5′ to 3′(i) a first primer annealing site sequence, (ii) the extension arm sequence, (iii) an inverted PCR primer annealing site comprising a restriction site that allows for asymmetric cutting, (iv) the ligation arm sequence, and (v) a second primer annealing site sequence, (b) a double stranded linear pLASSO vector comprising from 5′ to 3′ (i) the second primer annealing site sequence (ii) a first backbone region that does not substantially hybridize to the target sequence, (iii) a first recombination site, (iv) a selectable marker, (v) an origin of replication, (vi) a second recombination site, (vii) a second backbone region that does not substantially hybridize to the target sequence, and (viii) the first primer annealing site sequence, wherein the double stranded linear pLASSO vector further includes a nicking endonuclease recognition site (for example in the backbone), a restriction site not in the backbone (for example between the first recombination site and the selectable marker) used to digest a plasmid (e.g., SwaI or other restriction enzyme), and optionally a first restriction endonuclease site (such as SalI) and an optional second restriction endonuclease site (such as BamHI); and (c) optionally one or more endonucleases, one or more exonucleases, one or more recombinases; one or more growth media; one or more reagents for inverted PCR, or combinations thereof.

[0014] Also provided are isolated nucleic acid molecules, such as a pre-LASSO probe, such as one including at least 80%, at least 85%, at least 90%, at least 95%, at least 98%, at least 99%, or 100% sequence identity to any of SEQ ID NOS: 1-3088, 3090-3093, 3117-3121, and 3126. Also provided are vectors which include such probes. Also provided are isolated cells that include such isolated nucleic acid molecules or vectors, including prokaryotic or eukaryotic cells, such as bacterial, yeast, or mammalian cells.

[0015] The foregoing and other objects and features of the disclosure will become more apparent from the following detailed description, which proceeds with reference to the accompanying figures.

### BRIEF DESCRIPTION OF THE DRAWINGS

[0016] The patent or application file contains at least one drawing executed in color. Copies of this patent or patent application publication with color drawing(s) will be provided by the Office upon request and payment of the necessary fee.

[0017] FIG. 1A is a schematic drawing providing an overview of one embodiment of the disclosed DNA recombinase mediated assembly method for making mature ssDNA LASSO probes 30.

[0018] FIG. 1B is a schematic drawing providing an overview of the previous long adapter based assembly method for making mature ssDNA LASSO probes.

[0019] FIG. 2A is a schematic drawing providing details of an exemplary pre-lasso probe 12, pLASSO vector 14 (5′-end is “a”), and ssDNA mature LASSO probe 30.

[0020] FIG. 2B is a schematic drawing providing details on the linearization of the pLASSO vector 14 using tailed linearization primers 15 containing a and b selector sequences.

[0021] FIG. 2C is a schematic drawing providing details of an exemplary pLASSO vector 14 with nucleotide lengths provided.

[0022] FIG. 2D is a schematic drawing providing details of an exemplary pre-LASSO probe 12 sequence (SEQ ID NO: 3126). The ligation arms and extension arm are variable. Nucleotides (nt) 1-21 primer selector F annealing site; nt 1-18 primer selector a; nt 25-58 ligation arm; nt 59-121 inverted PCR primer annealing sites, nt 59-76 primer Thiol R (contains 3 phosphorothioated bonds at the 3′end); nt 77-95 Primer Sap1F (contains the restriction endonuclease site SapI); nt 96-121 Extension arm (variable), nt 122-141 Primer Selector R annealing site.

[0023] FIG. 2E is a schematic drawing providing details of an exemplary mature LASSO probe 30 sequence (GAGGGATTGGGCGTCAACGGGCAGTAGGATCCTACGGTCATTCAGCCTCCC CTTCTCCTGGTACGGAAGCAAAGCCTATGTTAAACACTGACTATCTGAAGCT CTCCTTCCCTGAAGGCTTGAGAGATTCATGAACTTCGAGGAAGGACGGAGA GTTTATTTATAAGGAACCAACTTCCCCTCCGATGGCCCTGTCATGAATTCTC ATGTTTGACAGCTTATCATCGATAAGCTTCCCATGGATAACTTCGTATAATG TATGCTATACGAAGTTATGGCTCGAGGAATTCAGAGAAGTCATCAAAGAGT TTAAAGAGTTTATGAGATTTAAGGTCAAGACAACGAGACACGAGTTCGAGA TTGAGGGAGAGAAGGCCCCTCAGCGGCCTTATAACTATAACGGTCCTAAGG TAGCGAACGAACAAACCGCTAAGCTCAAGGTCACAAAAGCAGACGACGGC CAGTGTCGACATGTCACTGTATCGCCGTCTAGTTCTGCTGTCTTGTC (SEQ ID NO: 3112). Nucleotides (nt) 1-26 extension arm (variable), nt 27-46 primer selector R annealing site; nt 47-207 backbone; 47-75 pLASSO linearization primer F annealing site; nt 52-72 postCaptR primer; nt 245-278 Loxp; nt 282-452 backbone; nt 380-386 Nt.BvCl site; nt 428-452 pLASSO linearization primer F annealing site; nt 428-448 postCaptF primer; nt 453-473 Primer selector F annealing site, nt 474-508 ligation arm (variable).

[0024] FIGS. 3A-3B is a schematic drawing providing details of the previous long adapter based assembly method, (A) resulting mature LASSO probe, and (B) LASSO probe precursors pre-LASSO and long adapter.

[0025] FIG. 4 is a digital image showing amplification of a pre-LASSO probe in lane 2 (lane 1 is a ladder).

[0026] FIG. 5 is a digital image showing amplification of pLox2+ (1); L=ladder.

[0027] FIG. 6 is a digital image showing digestion of a correctly assembled pLASSO, as indicated by digestion with (1) SwaI, (2) EcoRI, (3) EcoR1 plus Swa1, or (4) undigested. L=ladder.

[0028] FIG. 7 is a digital image showing amplification of a linearized pLASSO with the correct size (3.3 kb) in lane 2 (lane 1 is a ladder).

[0029] FIG. 8 is a digital image showing successful cloning of a pre-LASSO pool into pLASSO. A ˜160 bp band is present (1). L1 and L2 are ladders.

[0030] FIG. 9 is a digital image showing amplification of a mature LASSO probe (˜550 bp). L=ladder.

[0031] FIGS. 10A-10C is a schematic drawing of an exemplary embodiment of the disclosed DNA recombinase mediated LASSO assembly methods (A) A single pre-LASSO probe or a pre-LASSO library in shuttled in the linearized pLASSO vector via a Gibson Assembly reaction and used for transformation in E. coli. The coned library is harvested by scraping a sufficient number of colonies from plates. Plasmids are purified by using a plasmid miniprep. The presence of the pre-LASSO probes in the plasmids was verified by digesting with restriction enzymes that cut adjacently to the Gibson assembly insertion sites (Sal1, BamH1 sites). Gel electrophoresis results illustrate successful cloning of the pre-LASSO library in pLASSO. (B) The native supercoiled plasmids obtained by colony miniprep, are converted in the relaxed form by nicking with endonuclease Nt.BspQ1 that uses a recognition site located in the primer annealing site of the inserted pre-LASSO probe. Cre recombination of the LoxP sites produces a DNA minicircle containing the pre-LASSO and a circular 2.7 kb DNA circle, the remaining part of pLASSO. After recombination, the 2.7 kb DNA circle, together with the unreacted plasmids and bigger DNA circles generated by inter-plasmid recombination are eliminated by restriction followed by exonuclease digestion. Gel electrophoresis results illustrate successful formation of the expected nicked DNA minicircles (orange arrow) together with the 2.7 kb circular DNA remaining parts of pLASSO (green arrow), the unreacted plasmid (blue arrow). The approximately 6 kb band (yellow arrow) correspond to the recombination of two different plasmids (inter-plasmid recombination). Legend. Sal1, BamH1 and BspQ1 indicate restriction enzyme sites; Nick indicates nicking endonuclease site NtBspQ1; * indicates phosphorothioate bonds, U indicate a deoxyuracil moiety. Gel 1: L1. 1 kb DNA Ladder (NEB), L2. Low MW DNA Ladder (NEB), Lane 1. pLASSO library digested with Sal1 and BamH1, Lane 2. Negative control: pLASSO alone. Orange arrow. excited preLASSO probes inserts. Gel 2: L1. 1 kb DNA Ladder (NEB), L2. Low MW DNA Ladder (NEB), Lane 1. Cre recombination of nicked pLASSO library, Lane 2. Cre recombination of unnicked pLASSO library Orange arrow. DNA Minicircle containing preLASSO probes. Green arrow. Circular remaining part of pLASSO. Blue arrow. Unreacted pLASSO library Yellow arrow. Circular fusion products generated by intermolecular recombination events of two pLASSO plasmids. Gel 3: L2. Low MW DNA Ladder (NEB) Lane 1. Inverted PCR product derived from the linearization of the DNA minicircle Lane 2. Negative control: Cre-recombinase was not added in (b) consequently the DNA minicircle was not formed and the pLASSO library was completely destroyed during restriction/digestion step.

[0032] FIG. 11: Gel electrophoresis of post capture PCR amplicons obtained by capturing a single 1 kb target sequence in a constant Human total genomic DNA background (800 human genomes/μl). Captures displayed the 16 lanes were performed by testing tenfold dilutions of the LASSO probe against tenfold dilutions of the target sequence according with the concentrations shown in the table. In lane 12 no signal because pipetting error. Lane 16 negative control of the capture.

[0033] FIGS. 12A-12D. Workflow of LASSO probe library assembly and capture using (A) the novel DNA recombinase mediated methodology or (B) the previous intramolecular ligation assembly methodology in capturing a library of kilobase-sized ORFs from E. coli genomic DNA. The pre-LASSO probe pools are converted in a mature LASSO probe pool stepwise in a pooled format. Thousands of LASSO probes are hybridized on target DNA. Closed DNA circles containing captured ORFs are selected by exonuclease digestion, and then PCR amplified using universal primers. (C) Probe assembly NGS data analysis. (D) Mean read depth of all sequencing reads mapped to the LASSO probe libraries. The reference probe library sequences (N=3164) were grouped according to ranges of expected capture size in increasing order to highlight biases in probe formation and predict downstream capture performance. Read depth is defined as the number of reads that map to a specific reference sequence. On the horizontal axis, probe library sequences were grouped according to expected probe capture size ranges. The percentages of ORFs represented by concordant probes within these expected capture size ranges were plotted for both LASSO assembly methods. Concordant probes are properly formed probes with paired-end reads that map to a unique probe reference sequence.

[0034] FIGS. 13A-13F: (A) Average “arm concordancy” indicates the average of correctly paired probe arms versus total read sequences per probe type in the LASSO probe library obtained by using the DNA Recombinase Mediated Assembly (blue) or the previous methodology developed by Tosi et al. (2017) by using 2 ml ligation volume (red) and 50 μl volume (gray) for LASSO probe assembly. (B) Plot of absolute count of concordant LASSO probe types. (C) Median RPKM enrichment ratios of targeted ORFs versus non-targeted genetic elements ratios of a LASSO probe library obtained by using the DNA Recombinase Mediated Assembly (black) and the assembly method developed by Tosi et al. (2017) (gray). (D) Post-capture PCR of circles obtained from the capture of 3,078 ORFs of E. coli K12 performed using the LASSO probe library obtained with the DNA recombinase mediated assembly. The inset is a histogram denoting the size distribution of the targeted ORFs split into bin sizes of 40 bp. Targeted ORFs have an increase in 140 bp of residual LASSO sequences once captured and run on a gel. (E) Bee swarm plot combined with boxplot Average depth of sequencing per kilobase for each targeted ORF (n=3095) and non targeted ORF (n=905). Center lines show the medians; box limits indicate the 25th and 75th percentiles as determined by R software; whiskers extend 1.5 times the interquartile range from the 25th and 75th percentiles, outliers are represented by dots. n=3057, 1004 sample points. F. Normalized read depth of targeted ORFs as a function of the length of the ORFs.

[0035] FIGS. 14A-14B. Reagent optimization (A) Effect of type of DNA polymerase on capture efficiency KAPA Hi Fi v/s Omni Klentaq LA; (B) Effect of ligase concentration on capture efficiency.

[0036] FIGS. 15A-15D. (A) Effect of different melting temperature (Tm) ligation arms (65° C., 70° C. and 75° C.) and DNA backbone lengths (350 and 701 bp) in capturing a 3 kb target sequence within the M13 bacteriophage genomic DNA. Capture efficiency is expressed as total nanograms of post capture PCR product obtained by Gel Analyzer quantification. (B) Gel electrophoresis showing DNA target band intensity following PCR post-capture with LASSOs with different linker length: lane 1 to 5 show targets captured with a shorter 350 bp backbone linker, lane 6 to 10 show targets captured with a longer 701 bp backbone linker and with different melting arm temperature: lane 2, 3 and 4 capture of a 3K DNA target with LASSOs having 65° C., 70° C. and 75° C. ligation arms melting temperature respectively, lane 7, 8 and 9 capture of a 3K DNA target with LASSOs having 65° C., 70° C. and 75° C. ligation arms melting temperature respectively. Lane 1 and 6 capture of 1 kb DNA target (positive control). Lane 5 to 10 are negative controls identical to 1 and 6 but without template DNA. (C) Gel electrophoresis of post capture PCR amplicons of DNA target sequences within the M13 bacteriophage genomic DNA. Lane 1 and lane 4, capture of 1 kb DNA target (positive control). Lane 2 capture of a 4 kb DNA target, lane 3 and lane 6 negative control (identical to lane 1 but no DNA ligase in the gap filling mix), lane 5 capture of a 5 kb DNA target. (D) Sanger sequencing analysis of the 5 kb amplicon. The top inset shows the backbone sequence, the ligation arm of the LASSO probe and the initial part of the target sequence. The bottom insert shows the end of the backbone sequence, the extension arm of the LASSO probe and the end of the 5 kb target sequence. SEQ ID NOS: 3124 and 3125.

[0037] FIGS. 16A-16C. (A) Distribution of target lengths of sub pools. ligation arm Tm 65-70° C. extension arm Tm 70-75° C. (L65E70), ligation arm Tm 60-65° C. extension arm Tm 70-75° C. (L60E70), ligation arm Tm 70-75° C. extension arm Tm 65-70° C. (L70E65), ligation arm Tm 70-75° C. extension arm Tm 60-65° C. (L70E60), extension and ligation arm in the same range 65-70° C. (L65E65) respectively. (B) Table showing melting temperature intervals of probe arms for the lasso probe sub pools and number of LASSO probes in the sub pools. (C) Gel electrophoresis of post capture amplicons obtained by capturing ORFs from E. coli k12 genome using the LASSO subpools. Lane 1 capture with LASSO probes having low ligation arm melting temperature (65-70), lane 2 capture with LASSO probes having very low ligation arm melting temperature (60-65), lane 3 capture with LASSO probes having low extension arm melting temperature (65-70), lane 4 capture with LASSO probes having very low extension arm melting temperature (60-65), lane 5 capture with LASSO probes having extension and ligation arm in the same range (65-70).

[0038] FIGS. 17A-17D. (A) Bean plot representing the coverage for each targeted sequence in the different LASSO probe pools. Pools have different melting temperature of the capture arms as follow: ligation arm Tm 65-70° C. extension arm Tm 70-75° C. (L65E70), ligation arm Tm 60-65° C. extension arm Tm 70-75° C. (L60E70), ligation arm Tm 70-75° C. extension arm Tm 65-70° C. (L70E65), ligation arm Tm 70-75° C. extension arm Tm 60-65° C. (L70E60), extension and ligation arm in the same range 65-70° C. (L65E65) (B) Bean plot representing the coverage for targeted sequences of the pools listed in (A) cloned into pDONR, (C) Coverage distribution of non targeted ORFs in each of the same pools listed in (A). Black lines show the medians for each pools; white lines represent individual data points; polygons represent the estimated density of the data. (D) Density plot showing the distribution of sequences of the extension and ligation arm in the same range (L65E65) pool according the difference in the arm melting temperature as represented on the x-axis (ΔTm=Tm extension arm−Tm ligation arm).

### SEQUENCE LISTING

[0039] The nucleic acid sequences listed in the accompanying sequence listing are shown using standard letter abbreviations for nucleotide bases as defined in 37 C.F.R. 1.822. Only one strand of each nucleic acid sequence is shown, but the complementary strand is understood as included by any reference to the displayed strand. All strands are shown 5′ to 3′ unless otherwise indicated. The Sequence Listing is submitted as an XML file, “Sequence Listing.xml,” created on Oct. 14, 2022, 4,402,907 bytes, which is incorporated by reference herein.

[0040] SEQ ID NOS: 1 to 3088 provide exemplary pre-Lasso nucleic acid sequences.

[0041] SEQ ID NO: 3089 is an exemplary EcoRI backbone sequence.

[0042] SEQ ID NO: 3090 is an exemplary pre-LASSO probe sequence, wherein the N at nt 22 is a ligation arm, and nt 60 is an extension arm, wherein the sequence of the ligation arm and extension arm depend on the target sequence. Nt 1-21 is the primer selector F annealing site, nt 23-59 is the inverted PCT primer annealing site, and nt 61-80 the primer selector F annealing site.

[0043] SEQ ID NO: 3091 is an exemplary pre-LASSO M13 probe sequence. Nt 1-21 is the primer selector F annealing site, nt 22-47 is the ligation arm, nt 48-84 is the inverted PCT primer annealing site, mt 85-109 the extension arm, and nt 110-129 the primer selector F annealing site.

[0044] SEQ ID NO: 3092 is an exemplary pre-LASSO GAPDH probe sequence. Nt 1-21 is the primer selector F annealing site, nt 22-51 is the ligation arm, nt 52-88 is the inverted PCT primer annealing site, nt 89-115 the extension arm, and nt 116-135 the primer selector F annealing site.

[0045] SEQ ID NO: 3093 is an exemplary pre-LASSO F-actin probe sequence. Nt 1-21 is the primer selector F annealing site, nt 22-46 is the ligation arm, nt 47-83 is the inverted PCT primer annealing site, nt 84-108 the extension arm, and nt 109-128 the primer selector F annealing site.

[0046] SEQ ID NO: 3094-3101 are exemplary selector sequences.

[0047] SEQ ID NO: 3102 is a pLASSO linearization a sequence.

[0048] SEQ ID NO: 3103 is a pLASSO linearization b sequence.

[0049] SEQ ID NO: 3104 is a Sap1F primer sequence.

[0050] SEQ ID NO: 3105 is the sequence for the ThiolR primer.

[0051] SEQ ID NO: 3106 is an exemplary sequence for reserve primer PostCaptR.

[0052] SEQ ID NO: 3107 is an exemplary sequence for forward primer PostCaptF.

[0053] SEQ ID NO: 3108 is an exemplary sequence for forward primer Neb1F.

[0054] SEQ ID NO: 3109 is an exemplary sequence for reverse primer Neb1R SEQ ID NO: 3110 is an exemplary sequence for forward primer AttB1 CapF.

[0055] SEQ ID NO: 3111 is an exemplary sequence for reverse primer AttB2 CapR.

[0056] SEQ ID NO: 3112 is the sequence for an exemplary mature LASSO probe 30.

[0057] SEQ ID NO: 3113 is the sequence for primer selector F annealing site 1.

[0058] SEQ ID NO: 3114 is the sequence for primer selector R annealing site 2.

[0059] SEQ ID NO: 3115 is the inverted PCR primer annealing site.

[0060] SEQ ID NO: 3116 is an exemplary target sequence.

[0061] SEQ ID NO: 3117 is the pre-LASSO 3 kb M13 for 65° C. sequence.

[0062] SEQ ID NO: 3118 is the pre-LASSO 3 kb M13 for 70° C. sequence.

[0063] SEQ ID NO: 3119 is the pre-LASSO 3 kb M13 for 75° C. sequence.

[0064] SEQ ID NO: 3120 is the pre-LASSO 4 kb M13 sequence.

[0065] SEQ ID NO: 3121 is the pre-LASSO 5 kb M13 sequence.

[0066] SEQ ID NO: 3122 is the 350 bp EcoR1 Backbone sequence.

[0067] SEQ ID NO: 3123 is the 700 bp EcoR1 Backbone sequence.

[0068] SEQ ID NOS: 3124 and 3125 are the Sanger sequenced for the 5 kB target shown in FIG. 15D.

[0069] SEQ ID NO: 3126 is an exemplary pre-LASSO sequence.

cAgACGACGGCCAGTgtcgacATGTCACTGTATCGCCGTCTAGTTCTGC
TGTCTTGTCAACACTTCTTGCGGCGATGGTTCCTGGCTCTTCGATCGAG
GGATTGGGCGTCAACGGGCAGTAGGATCCTACggtcATtCAGC

### DETAILED DESCRIPTION

[0070] Unless otherwise explained, all technical and scientific terms used herein have the same meaning as commonly understood by one of ordinary skill in the art to which this disclosure belongs. Definitions of common terms in molecular biology may be found in Benjamin Lewin, Genes V, published by Oxford University Press, 1994 (ISBN 0-19-854287-9); Kendrew et al. (eds.), The Encyclopedia of Molecular Biology, published by Blackwell Science Ltd., 1994 (ISBN 0-632-02182-9); and Robert A. Meyers (ed.), Molecular Biology and Biotechnology: a Comprehensive Desk Reference, published by VCH Publishers, Inc., 1995 (ISBN 1-56081-569-8).

[0071] The singular terms “a,” “an,” and “the” include plural referents unless context clearly indicates otherwise. Similarly, the word “or” is intended to include “and” unless the context clearly indicates otherwise. Hence “comprising A or B” means including A, or B, or A and B. It is further to be understood that all base sizes or amino acid sizes, and all molecular weight or molecular mass values, given for nucleic acids or polypeptides are approximate, and are provided for description. Although methods and materials similar or equivalent to those described herein can be used in the practice or testing of the present disclosure, suitable methods and materials are described below. All Genbank® Accession numbers (the sequence available on Oct. 14, 2020) mentioned herein are incorporated by reference in their entireties. The materials, methods, and examples are illustrative only and not intended to be limiting.

[0072] In order to facilitate review of the various embodiments of the disclosure, the following explanations of specific terms are provided:

[0073] cDNA (complementary DNA): A piece of DNA lacking internal, non-coding segments (introns) and regulatory sequences which determine transcription. cDNA can be synthesized in the laboratory by reverse transcription from messenger RNA extracted from cells.

[0074] Culture or growth media: Any substance used to culture cells, such as mammalian cells and microorganisms, for example bacteria. Such media includes any growth medium (e.g., broth or gel) which supports life (e.g., a microorganism that is actively metabolizing carbon). Culture medium usually contains a carbon source, such as glucose, xylose, cellulosic material and the like. The carbon source can be anything that can be utilized, with or without additional enzymes, by the cell or microorganism for energy.

[0075] Gene: A part of a genome, or a nucleic acid molecule, comprising transcriptional and/or translational regulatory sequences and/or a coding region and/or non-translated sequences (e.g., introns, 5′- and 3′-untranslated sequences). The coding region of a gene (such as a target gene) may be a nucleotide sequence coding for an amino acid sequence or a functional RNA. Genes include regulatory sequences (e.g. promoters, enhancers, etc.) and/or intron sequences, and a sequence, termed an “open reading frame” that encodes a protein.

[0076] Hybridization: To form base pairs between complementary regions of two strands of DNA, RNA, or between DNA and RNA, thereby forming a duplex molecule.

[0077] Hybridization conditions resulting in particular degrees of stringency will vary depending upon the nature of the hybridization method and the composition and length of the hybridizing nucleic acid sequences. Generally, the temperature of hybridization and the ionic strength (such as the Na⁺ concentration) of the hybridization buffer will determine the stringency of hybridization. Calculations regarding hybridization conditions for attaining particular degrees of stringency are discussed in Sambrook et al., (1989) Molecular Cloning, second edition, Cold Spring Harbor Laboratory, Plainview, N.Y. (chapters 9 and 11). The following is an exemplary set of hybridization conditions and is not limiting:

[0078] Very High Stringency (Allows Sequences that Share at Least 90% Sequence Identity to Hybridize to One Another)
[0079] Hybridization: 5×SSC at 65° C. for 16 hours
[0080] Wash twice: 2×SSC at room temperature (RT) for 15 minutes each
[0081] Wash twice: 0.5×SSC at 65° C. for 20 minutes each

[0082] High Stringency (Allows Sequences that Share at Least 80% Sequence Identity to Hybridize to One Another)
[0083] Hybridization: 5×-6×SSC at 65° C.-70° C. for 16-20 hours
[0084] Wash twice: 2×SSC at RT for 5-20 minutes each
[0085] Wash twice: 1×SSC at 55° C.-70° C. for 30 minutes each

[0086] Low Stringency (Allows Sequences that Share at Least 60% Sequence Identity to Hybridize to One Another)
[0087] Hybridization: 6×SSC at RT to 55° C. for 16-20 hours
[0088] Wash at least twice: 2×-3×SSC at RT to 55° C. for 20-30 minutes each.

[0089] Isolated: An “isolated” biological component (such as a nucleic acid molecule, protein, or cell) has been substantially separated or purified away from other biological components in the cell of the organism, or the organism itself, in which the component naturally occurs, such as other chromosomal and extra-chromosomal DNA and RNA, proteins and cells. Nucleic acid molecules and proteins that have been “isolated” include nucleic acid molecules and proteins purified by standard purification methods. The term also embraces nucleic acid molecules and proteins prepared by recombinant expression in a host cell as well as chemically synthesized nucleic acid molecules and proteins.

[0090] Mammal: This term includes both human and non-human mammals. Examples of mammals include, but are not limited to: humans, non-human primates, pigs, cows, goats, cats, dogs, rabbits, rats, and mice. In one example, a target sequence is a mammalian nucleic acid molecule, such as a mammalian gene or cDNA.

[0091] Nucleic Acid Molecule: Refers to DNA and RNA molecules, such as cDNA and mRNA. Can include naturally occurring and/or non-naturally occurring nucleotides.

[0092] Nucleotides: The major nucleotides of DNA are deoxyadenosine 5′-triphosphate (dATP or A), deoxyguanosine 5′-triphosphate (dGTP or G), deoxycytidine 5′-triphosphate (dCTP or C) and deoxythymidine 5′-triphosphate (dTTP or T). The major nucleotides of RNA are adenosine 5′-triphosphate (ATP or A), guanosine 5′-triphosphate (GTP or G), cytidine 5′-triphosphate (CTP or C) and uridine 5′-triphosphate (UTP or U). Includes nucleotides containing modified bases, modified sugar moieties and modified phosphate backbones, for example as described in U.S. Pat. No. 5,866,336 to Nazarenko et al. (herein incorporated by reference). Examples of modified sugar moieties which may be used to modify nucleotides at any position on its structure include, but are not limited to: arabinose, 2-fluoroarabinose, xylose, and hexose, or a modified component of the phosphate backbone, such as phosphorothioate, a phosphorodithioate, a phosphoramidothioate, a phosphoramidate, a phosphordiamidate, a methylphosphonate, an alkyl phosphotriester, or a formacetal or analog thereof.

[0093] ORF (open reading frame): A series of nucleotide triplets (codons) coding for amino acids without any termination codons. These sequences are usually translatable into a peptide.

[0094] Pharmaceutically Acceptable Carrier: The pharmaceutically acceptable carriers useful in this disclosure are conventional. Remington's Pharmaceutical Sciences, by E. W. Martin, Mack Publishing Co., Easton, Pa., 19th Edition (1995), describes examples of such that can be used with one or more nucleic acid molecules provided herein. Examples include pharmaceutically and physiologically acceptable fluids such as water, physiological saline, balanced salt solutions, aqueous dextrose, glycerol or the like.

[0095] Polymerase Chain Reaction (PCR): An in vitro amplification technique that increases the number of copies of a nucleic acid molecule (for example, a nucleic acid minicircle). The product of a PCR can be characterized by techniques such as electrophoresis, restriction endonuclease cleavage patterns, oligonucleotide hybridization or ligation, and/or nucleic acid sequencing. A specific type of PCR is inverse PCR, which is used to amply DNA with only one known sequence.

[0096] In some examples, PCR utilizes primers, for example, DNA oligonucleotides 10-100 nucleotides in length, such as about 15, 20, 25, 30 or 50 nucleotides or more in length (such as primers that can be annealed to a complementary target DNA strand by nucleic acid hybridization to form a hybrid between the primer and the target DNA strand). Primers can be at least 15, at least 20, at least 25, at least 30, at least 35, at least 40, at least 45, at least 50 or more consecutive nucleotides of a nucleotide sequence of interest. Methods for preparing and using nucleic acid primers are described, for example, in Sambrook et al. (In Molecular Cloning: A Laboratory Manual, CSHL, New York, 1989), Ausubel et al. (ed.) (In Current Protocols in Molecular Biology, John Wiley & Sons, New York, 1998), and Innis et al. (PCR Protocols, A Guide to Methods and Applications, Academic Press, Inc., San Diego, Calif., 1990).

[0097] Primer: Short nucleic acids, for example DNA or RNA oligonucleotides 10 nucleotides or more in length, which are annealed to a complementary target nucleic acid strand (e.g., a minicircle nucleic acid molecule) by nucleic acid hybridization to form a hybrid between the primer and the target nucleic acid strand, then extended along the target nucleic acid strand by a polymerase enzyme. Individual primers can be used for nucleic acid sequencing. In addition, primer pairs can be used for amplification of a nucleic acid sequence, e.g., by PCR (such as inverse PCR) or other nucleic-acid amplification methods.

[0098] Primers can have at least 10 nucleotides complementary to the nucleic acid molecule to be sequenced. To enhance specificity, longer primers can be employed, such as primers having at least 15, at least 20, at least 30, at least 40, at least 50, at least 60, at least 70, at least 80, at least 90 or at least 100 consecutive nucleotides of the complementary nucleic acid molecule to be sequenced. Methods for preparing and using primers are described in, for example, Sambrook et al. (1989) Molecular Cloning: A Laboratory Manual, Cold Spring Harbor, N.Y.; Ausubel et al. (1987) Current Protocols in Molecular Biology, Greene Publ. Assoc. & Wiley-Intersciences.

[0099] In one example, a primer is a DNA, RNA, or a mixture of both.

[0100] Recombinant: A recombinant nucleic acid is one that has a sequence that is not naturally occurring or has a sequence that is made by an artificial combination of two otherwise separated segments of sequence. In some examples artificial combination is accomplished by chemical synthesis or by the artificial manipulation of isolated segments of nucleic acid molecules, e.g., by genetic engineering techniques such as those described in Sambrook et al. (ed.), Molecular Cloning: A Laboratory Manual, 3d ed., vol. 1-3, Cold Spring Harbor Laboratory Press, Cold Spring Harbor, N.Y., 2001. The term recombinant includes nucleic acid molecules that have been altered solely by addition, substitution, or deletion of a portion of the nucleic acid molecule. A recombinant or transformed organism or cell, such as a recombinant E. coli, is one that includes at least one exogenous nucleic acid molecule, such as a vector comprising a pre-LASSO probe (e.g., 16 of FIG. 1A).

[0101] Sample: Any biological, food, or environmental specimen (or source) that may contain (or is known to contain or is suspected of containing) a target nucleic acid molecule can be used in the methods herein.

[0102] Sequence identity/similarity: The identity/similarity between two or more nucleic acid sequences, or two or more amino acid sequences, is expressed in terms of the identity or similarity between the sequences. Sequence identity can be measured in terms of percentage identity; the higher the percentage, the more identical the sequences are. Sequence similarity can be measured in terms of percentage similarity (which takes into account conservative amino acid substitutions); the higher the percentage, the more similar the sequences are.

[0103] Methods of alignment of sequences for comparison are well known in the art. Various programs and alignment algorithms are described in: Smith & Waterman, Adv. Appl. Math. 2:482, 1981; Needleman & Wunsch, J. Mol. Biol. 48:443, 1970; Pearson & Lipman, Proc. Natl. Acad. Sci. USA 85:2444, 1988; Higgins & Sharp, Gene, 73:237-44, 1988; Higgins & Sharp, CABIOS 5:151-3, 1989; Corpet et al., Nuc. Acids Res. 16:10881-90, 1988; Huang et al. Computer Appls. in the Biosciences 8, 155-65, 1992; and Pearson et al., Meth. Mol. Bio. 24:307-31, 1994. Altschul et al., J. Mol. Biol. 215:403-10, 1990, presents a detailed consideration of sequence alignment methods and homology calculations.

[0104] The NCBI Basic Local Alignment Search Tool (BLAST) (Altschul et al., J. Mol. Biol. 215:403-10, 1990) is available from several sources, including the National Center for Biological Information (NCBI, National Library of Medicine, Building 38A, Room 8N805, Bethesda, Md. 20894) and on the Internet, for use in connection with the sequence analysis programs blastp, blastn, blastx, tblastn and tblastx. Additional information can be found at the NCBI web site.

[0105] BLASTN is used to compare nucleic acid sequences, while BLASTP is used to compare amino acid sequences. To compare two nucleic acid sequences, the options can be set as follows: -i is set to a file containing the first nucleic acid sequence to be compared (e.g., C:\seq1.txt); -j is set to a file containing the second nucleic acid sequence to be compared (e.g., C:\seq2.txt); -p is set to blastn; -o is set to any desired file name (e.g., C:\output.txt); -q is set to −1; -r is set to 2; and all other options are left at their default setting. For example, the following command can be used to generate an output file containing a comparison between two sequences: C:\Bl2seq -i c:\seq1.txt -j c:\seq2.txt -p blastn -o c:\output.txt -q -1 -r 2.

[0106] To compare two amino acid sequences, the options of Bl2seq can be set as follows: -i is set to a file containing the first amino acid sequence to be compared (e.g., C:\seq1.txt); -j is set to a file containing the second amino acid sequence to be compared (e.g., C:\seq2.txt); -p is set to blastp; -o is set to any desired file name (e.g., C:\output.txt); and all other options are left at their default setting. For example, the following command can be used to generate an output file containing a comparison between two amino acid sequences: C:\Bl2seq -i c:\seq1.txt -j c:\seq2.txt -p blastp -o c:\output.txt. If the two compared sequences share homology, then the designated output file will present those regions of homology as aligned sequences. If the two compared sequences do not share homology, then the designated output file will not present aligned sequences.

[0107] Once aligned, the number of matches is determined by counting the number of positions where an identical nucleotide or amino acid residue is presented in both sequences. The percent sequence identity is determined by dividing the number of matches either by the length of the sequence set forth in the identified sequence, or by an articulated length (e.g., 100 consecutive nucleotides or amino acid residues from a sequence set forth in an identified sequence), followed by multiplying the resulting value by 100. For example, a nucleic acid sequence that has 1166 matches when aligned with a test sequence having 1554 nucleotides is 75.0 percent identical to the test sequence (i.e., 1166÷1554*100=75.0). The percent sequence identity value is rounded to the nearest tenth. For example, 75.11, 75.12, 75.13, and 75.14 are rounded down to 75.1, while 75.15, 75.16, 75.17, 75.18, and 75.19 are rounded up to 75.2. The length value will always be an integer. In another example, a target sequence containing a 20-nucleotide region that aligns with 20 consecutive nucleotides from an identified sequence as follows contains a region that shares 75 percent sequence identity to that identified sequence (i.e., 15÷20*100=75).

[0108] For comparisons of amino acid sequences of greater than about 30 amino acids, the Blast 2 sequences function is employed using the default BLOSUM62 matrix set to default parameters, (gap existence cost of 11, and a per residue gap cost of 1). Homologs are typically characterized by possession of at least 70% sequence identity counted over the full-length alignment with an amino acid sequence using the NCBI Basic Blast 2.0, gapped blastp with databases such as the nr or swissprot database. Queries searched with the blastn program are filtered with DUST (Hancock and Armstrong, 1994, Comput. Appl. Biosci. 10:67-70). Other programs use SEG. In addition, a manual alignment can be performed. Proteins with even greater similarity will show increasing percentage identities when assessed by this method, such as at least 75%, 80%, 85%, 90%, 95%, or 99% sequence identity.

[0109] Nucleic acid sequences that do not show a high degree of identity may nevertheless encode identical or similar (conserved) amino acid sequences, due to the degeneracy of the genetic code. Changes in a nucleic acid sequence can be made using this degeneracy to produce multiple nucleic acid molecules that all encode substantially the same protein. Such homologous nucleic acid sequences can, for example, possess at least 60%, 70%, 80%, 90%, 95%, 98%, or 99% sequence identity determined by this method.

[0110] One of skill in the art will appreciate that these sequence identity ranges are provided for guidance only; it is possible that strongly significant homologs could be obtained that fall outside the ranges provided.

[0111] Subject: Living multi-cellular vertebrate organism, a category that includes human and non-human mammals, such as a veterinary subject (e.g., rabbit, rat, mouse, dog, cat, cow, pig, or non-human primate).

[0112] Transformed: A cell, such as a host cell, into which a nucleic acid molecule has been introduced, for example by molecular biology methods. Transformation encompasses all techniques by which a nucleic acid molecule might be introduced into a cell, including, but not limited to chemical methods (e.g., calcium-phosphate transfection), physical methods (e.g., electroporation, microinjection, particle bombardment), fusion (e.g., liposomes), receptor-mediated endocytosis (e.g., DNA-protein complexes, viral envelope/capsid-DNA complexes) and by biological infection by viruses such as recombinant viruses. In one example, the transformed host cell is a bacterial cell, such as E. coli.

[0113] Vector: A nucleic acid molecule used to carry foreign genetic material, for example into a host cell, thereby producing a transformed or recombinant host cell. A vector may include nucleic acid sequences that permit it to replicate in the host cell, such as an origin of replication. A vector may also include a selectable marker gene, and other genetic elements. A vector can transduce, transform or infect a cell, thereby causing the cell to express nucleic acids and/or proteins. A vector optionally includes materials to aid in achieving entry of the nucleic acid into the cell, such as a viral particle, liposome, protein coating or the like. In one example, a vector is a plasmid, such as a plasmid exogenous to the cell or organism into which it is introduced. A vector can be linear (e.g., 14 of FIG. 1A) or circular (e.g., 16 of FIG. 1A).

### Overview

[0114] Provided herein is a DNA recombinase mediated assembly methods for generating mature ssDNA LASSO probes. As shown in FIGS. 1A and 2A-2D, the disclosed DNA recombinase mediated assembly methods 10 use a pre-LASSO probe 12 and vector pLASSO 14. In contrast, the previous long adapter based assembly procedure (FIGS. 1B, 3A, 3B) 100 uses a different pre-LASSO probe 110 and a long adapter sequence 112 instead of a vector 14. The resulting mature ssDNA LASSO probes can be used to produce genome-wide ORFeome libraries of prokaryotic and eukaryotic organisms, such as bacteria and humans (such as full length ORFs from human total cDNA). The resulting libraries can be used for next generating sequencing (NGS) analysis or shuttled in standard expression vectors for functional screening applications. Details can also be found in Tosi et al. (Biotechnol J., 17(2):e2100240, 2021), and Chkaiban et al. (Curr Protoc, (11):e278, 2021), herein incorporated by reference in their entireties.

[0115] In the prior method, (FIG. 1B), the resulting product did to produce a sufficiently pure population of mature ssDNA LASSO probes 128. Some of the mature ssDNA LASSO probes 128 had one arm (extension arm or ligation arm) that did not recognize or hybridize to the target nucleic acid molecule (e.g., hybridized to a non-target or non-specific region). In contrast, the new methods (FIG. 1A) provide mature ssDNA LASSO probes 30 that are purer than the prior method. For example, at least 40% of the mature ssDNA LASSO probes have extension and ligation arms that bind to the correct nucleic acid target (as compared to about 10% in the prior method). The disclosed methods omit the fusion PCR step, and instead use a recombination system.

[0116] As shown in FIGS. 1A and 2A-2B, 2D the pre-LASSO probe 12 is a synthetic oligonucleotide that includes a 5′-end and a 3′-end, each end containing a primer annealing site 50, 58. Following the 5′-end primer annealing site 50, the pre-LASSO probe 12 includes an extension arm 52, an inverted PCR primer annealing site 54, a ligation arm 56, and a 3′-end primer annealing site 58. In some examples, the pre-LASSO probe 12 is composed of naturally occurring nucleotides, non-naturally occurring nucleotides, or a mixture of both types. In some examples, the pre-LASSO probe 12 is at least 100 bp, at least 110 bp, at least 120 bp, at least 130 bp, at least 140 bp, at least 150 bp, or at least 160 bp, such as 100 to 500 bp, 100 to 400 bp, 100 to 300 bp, 100 to 200 bp, 100 to 170 bp, 100 to 160 bp, 140 to 180 bp, 140 to 170 bp, 150 to 170 bp, such as about 160 bp. The pre-LASSO probe 12 can be single stranded or double stranded DNA. In some examples, a ss pre-LASSO probe is converted to a ds DNA pre-LASSO probe for use in the disclosed methods. Exemplary ss pre-LASSO probes are provided in SEQ ID NOS: 1-3088, 3090-3093, 3117-3121, and 3126, and thus in some examples, a ss pre-LASSO probe is one including at least 80%, at least 85%, at least 90%, at least 95%, at least 98%, at least 99%, or 100% sequence identity to any of SEQ ID NOS: 1-3088, 3090-3093, 3117-3121, and 3126. In one example, a ss pre-LASSO probe includes at least 80%, at least 85%, at least 90%, at least 95%, at least 98%, at least 99%, or 100% sequence identity to SEQ ID NO: 3090, wherein N22 and N60 are the ligation and extension arms, respectively, having of a length of about 20-40 nt, 20-50 nt, or 20-80 nt each.

[0117] The primer annealing sites 50, 58 can specifically bind or hybridize to amplification primers (e.g., primers a and b 15 in FIG. 2b) used to amplify the pre-LASSO probe, and can include selector sequences for cloning. In some examples, the primer annealing sites do not form secondary or tertiary structures, such as hairpins. Each primer annealing site 50, 58 can be at least 10 base pairs (bp), such as at least 12, at least 15, or at least 20 bp, such as 10-50 bp, 10-40-bp, or 10-20 bp, such as 10, 11, 12, 13, 14, 15, 16, 17, 18, 19, 20, 21, 22, 23, 24, 25, 26, 27, 28, 29, 30, 31, 32, 33, 34, 35, 36, 37, 38, 39, or 40 bp.

[0118] The sequence of the ligation arm 56 and extension arm 52 of the pre-LASSO probe 12 are complementary to the target sequence, and in the same 5′-3′ orientation of the target sequence to be captured. The sequence of the ligation arm 56 and extension arm 52 should only specifically hybridize to specifically bind to the target sequence, and not other sequences in the genome of the target organism. The ligation arm 56 and extension arm 52 end up as part of the ssDNA mature LASSO probe 30. The ligation arm 56 hybridizes or binds to a 5′-end of the target sequence, while the extension arm 52 hybridizes or binds to a 3′-end of the target sequence. For example, if the sequence of the target is 5′ATGCCAnnnnnnnTGATTGnnnnnn 3′ (SEQ ID NO: 3116) from the start (ATG) to the stop (TGA) codon, the ligation arm 56 and the extension arm 52 can have a sequence that begins with 5′ ATGCCAnnn and 5′TGATTGnnnnnn, respectively, and can be extended until the desired melting temperatures (Tm) are reached. In some examples, ligation arm 56 terminates in a C or G residue. In some examples the ligation arm 56 and extension arm 52 of the pre-LASSO probe 12 share 100% complementarity to a continuous 5′- and 3′-region, respectively, of target sequence. One skilled in the art will appreciate that lower complementarity is possible, such as at least 80%, at least 85%, at least 90%, at least 95%, at least 98%, or at least 99% complementarity to a continuous 5′- and 3′-region target sequence. The length of the ligation arm 56 and extension arm 52 can vary to achieve the desired Tm. In some examples, the Tm of extension arm 52 is about 50° C.-58° C., such as 52-56° C., such as 52° C., 53° C., or 54° C. In some examples, the Tm of ligation arm 56 is about 53° C.-61° C., such as 56-60° C., such as 57° C., 58° C., or 59° C. In some examples, the Tm of the extension arm 52 is 65-70° C. and ligation arm 56 is 70-75° C. In some examples, the Tm of the ligation arm 56 is about 2.5-5° C. (such as about 3, 4 or 5° C.) higher than the extension arm 52. In some examples, the Tm of the extension arm 52 and the ligation arm 56 are in the same range, such as 65-70° C. for both, or have the same Tm, such as 65° C. In some examples, each of ligation arm 56 and extension arm 52 is at least 10 bp, such as at least 12, at least 15, at least 20 bp, at least 25 bp, at least 30 bp, at least 40 bp, or at least 50 bp, such as 10-50 bp, 10-40-bp, 25-35 bp, or 20-40 bp, such as 10, 11, 12, 13, 14, 15, 16, 17, 18, 19, 20, 21, 22, 23, 24, 25, 26, 27, 28, 29, 30, 31, 32, 33, 34, 35, 36, 37, 38, 39, or 40 bp.

[0119] In between the ligation arm 56 and extension arm 52 of the pre-LASSO probe 12 is an inverted PCR primer annealing site 54. The sequence of the inverted PCR primer annealing site 54 includes a restriction site that allows for asymmetric cutting (see steps F and G in FIG. 1A), such as a Type IIS restriction site that results in cleavage outside of its recognition sequence. Examples include BbvI, BcgI, BspMI, BspQ1, BtgZI, Esp3I, FokI, MboII, and SapI. In a specific example, a BspQ1 restriction site is present.

[0120] In some examples, an algorithm is used to design the sequence of the pre-LASSO probe 12. For example, thousands of ligation arm 56 and extension arm 52 sequences can be designed based on the target sequence, such as genomic or metagenomics DNA sequence(s). The algorithm can adjust the thresholds for target length, melting temperature, or the length of the ligation/extension arms 52, 56 to identify probe sequences. In one example, the algorithm first selects the ORF leading and trailing 32-mer sequences for the ligation arm 56 and extension arm 52, determining whether the last nucleotide of the arm is a cytosine or a guanine and that the melting temperature for the ligation arm 56 and extension arm 52 is 60° C.-85° C. and 55° C.-80° C., respectively. If one of these conditions are not satisfied, the algorithm increases the length of the arms by one nucleotide and the conditions re-tested until they are satisfied or the end of the ORF of the target sequences is reached.

[0121] In some examples, the target sequence captured is at least 1 Kb, at least 2 Kb, at least 3 Kb, at least 4 Kb, or at least 5 Kb, such as 1-6 Kb, 1-5 Kb, or 2-4 Kb.

[0122] In some examples, a pre-LASSO library is used, which is typically composed by thousands of different pre-LASSO probes 12. Such a library can be PCR amplified using primers that specifically hybridize or bind to primer annealing sites 50, 58. Different primer annealing sites 50, 58 within members of the pre-LASSO libraries can be used to selectively amplify sub-pools within the larger library. Exemplary pairs of primer annealing sites 50, 58 for pre-LASSO probe library amplification are provided in SEQ ID NOS: 1-3088.

[0123] As shown in FIGS. 2A-2C and 2E, vector pLASSO 14 is plasmid produced from the pLox2+ linear plasmid (New England Biolabs) and includes two backbone regions 60, 62 (e.g., nt 47-207 and 282-452 of FIG. 2E). As shown in FIG. 2B, the pLASSO plasmid can begin as a circular vector 13, and be linearized using PCR amplification with tailed primers a, b, 15. This results in a linear pLASSO plasmid 14. The pLASSO plasmid 14 provides two backbone regions 60, 62 for the ssDNA mature LASSO probe 30, and functional sites required for the assembly of the mature LASSO probe 30. The backbone regions 60, 62 have nucleic acid sequence that does not substantially hybridize or bind to a sequence within the target genome. In some examples, each backbone region 60, 62 includes a unique sequence tag that allows for subsequent isolation of all mature pLASSO probes containing the unique sequence. The length of the backbone regions 60, 62 can vary depending on the size of the target. In some examples, each backbone region 60, 62 is at least 100 bp, at least 150 bp, at least 200 bp, at least 250 bp, at least 300 bp, at least 350 bp, at least 400 bp, at least 500 bp, at least 460 bp, at least 700 bp, or at least 800 bp, such as 100 to 1000 bp, 100 to 800 bp, 200 to 800 bp, 200 to 400 bp, 400 to 800 bp, such as about 200, 400, or 800 bp. Vector pLASSO 14 includes two recombination sites 64, 66 (pink triangles in FIG. 1A, 2) (examples of recombination sites that can be use include loxP for Cre recombination, and for FRT for filppase (FLP) recombination), two selector primer annealing sites 50, 58 for linearization and specificity towards to a specific primer annealing site pre-LASSO probe, an origin of replication (Ori) 68, and a selectable marker 70, such as antibiotic resistance gene (e.g., ampicillin, hygromycin, chloroamphenicol, tetracycline, and kanamycin) to permit selection of appropriate colonies. The selector primer annealing sites 50, 58 are identical in sequence to the primer annealing sites 50, 58 in the pre-LASSO probe and are introduced into pLASSO 14 during PCR linearization with selector primers (see FIG. 2B, top, tailed linearization primers anneal to circular pLASSO at the light blue regions, resulting in linearization and addition of the primer annealing sites 50, 58 (a and b grey area in bottom panel FIG. 2B). Vector pLASSO 14 further includes a nicking endonuclease recognition site 72 (for example in the backbone), such as Nt.BbvCI, Nt.BstNBI, Nb.BtsI, or Nb.BsrDI. Vector pLASSO 14 can also include additional restriction enzyme sites such as SalI and BamHI (for example in or near each backbone 60, 62, which can be used for verification steps).

[0124] In some examples, the backbone sequence used includes at least 80%, at least 85%, at least 90%, at least 95%, at least 98%, at least 99%, or 100% sequence identity to any of SEQ ID NOS: 3089, 3122, and 3123.

[0125] As shown in FIGS. 1A and 2A, following the disclosed assembly process, the resulting ssDNA mature LASSO probe 30 generated using the method illustrated in FIG. 1A and described herein, includes from 5′ to 3′, extension arm 52, backbone 62, recombination site 64, backbone 60, and ligation arm 56. In some examples, ssDNA mature LASSO probe 30 is at least 300 nt, such as at least 400, at least 450, at least 500 nt, at least 550 nt, at least 600 nt, at least 650 nt, or at least 700 nt, such as 300-1000 nt, 300-800 nt, 300-700 bp, 400-700 nt, 500 to 700 nt, 550-650 nt, such as about 600 nt, about 625 nt, or about 650 nt.

[0126] An overview of the DNA recombinase mediated assembly method is shown in FIG. 1A (and contrasted with the prior long adapter based assembly method in FIG. 1B). As shown in step A of FIG. 1A, the pre-LASSO probe 12 is integrated into the linearized pLASSO vector 14, for example using sequence independent ligation (e.g., no restriction site is required). In some examples NEBbuilder or Gibson Assembly® reaction is used. In this reaction, a 5′ exonuclease generates long overhangs in the primer annealing sites 50, 58, allowing the primer annealing sites 50, 58 from the pre-LASSO probe 12 to anneal to the corresponding primer annealing sites 50, 58 of the linearized pLASSO vector 14. A polymerase (such as a DNA polymerase, such as one having low strand displacement, such as Kapa HiFi or Omni Klentaq LA) fills in the gaps of the annealed single strand regions, and a DNA ligase seals the nicks of the annealed and filled-in gaps. The pre-LASSO probe primer annealing sites 50 and 58 link with the primer selector annealing sequences 50, 58 of pLASSO (FIG. 1 A, a and b selectors) generating a circular pLASSO vector 16 containing the pre-LASSO probe 12 (step B of FIG. 1A). As shown in step C of FIG. 1A, the circular pLASSO vector 16 is introduced into host cells, such as bacterial cells (e.g., E. coli). Any method of transformation can be used, such as electroporation. In some examples, NEBuilder assembly solution is used for E. coli electroporation. The transformed cells can be grown in the presence of an appropriate selection growth media, depending on the selectable marker 70 in circular pLASSO vector 16 (e.g., ampicillin-containing media if the gene is AmpR). Resulting colonies that survive the selection media (such as growth in the presence of an appropriate antibiotic), are collected and the circular pLASSO vector 16 extracted/removed from the cells.

[0127] The circular pLASSO vector 16 can form supercoils, which can adversely affect recombination. Therefore, as shown in step D of FIG. 1A, the circular pLASSO vector 16 is subjected to treatment with a nicking endonuclease, which cleaves one of the two DNA strands of the circular pLASSO vector 16 by using a nicking endonuclease recognition site 72 located in backbone region 62 (see FIG. 2A) (nicking endonuclease recognition site 72 could be located elsewhere in circular pLASSO vector 16, such as in primer selector annealing site 50 or 58 from linearized pLASSO 14). The nicking endonuclease used will depend on the particular sequence of the nicking endonuclease recognition site 72. Treatment with the nicking endonuclease relaxes the supercoiled circular pLASSO vector 16. The relaxed/nicked form of the circular pLASSO vector 16 can improve subsequent DNA recombination.

[0128] Following treatment with a nicking endonuclease, the relaxed circular pLASSO vector 16 is treated with a recombinase (such as Cre- or FLP-exonuclease), the two recombination sites (e.g., pLox or FRT) sites 64, 66 in pLASSO recombine. This internal DNA recombination produces DNA minicircles 18 containing the pre-LASSO probe 12, and the remaining part of the pLASSO vector 20 (e.g., did not integrate the pre-LASSO probe 12) (can be about 2.7 kb) (step E of FIG. 1A). The process may also generate an approximately 6 kb double plasmid generated by inter-plasmid recombination. The minicircles containing a single pre-LASSO probe 18 are recovered by selective cutting with restriction enzyme and exonuclease digestion (e.g., exonuclease V) of the remaining part of the pLASSO vector 20 (step E of FIG. 1A). That is, the remaining part of the pLASSO vector 20 can be selectively removed or destroyed. For example, the remaining part of the pLASSO vector 20 can be incubated with one or more restriction enzymes that recognize a site not found in the minicircle 18. For example, as shown in FIG. 1A, step D and FIG. 2C, a SwaI site can be included. In some examples, a minicircle 18 is at least 300 bp, such as at least 400, at least 450, at least 500 bp, at least 550 bp, at least 600 bp, at least 650 bp, or at least 700 bp, such as 300-1000 bp, 300-800 bp, 300-700 bp, 400-700 bp, 500 to 700 bp, 550-650 bp, such as about 600 pb, about 625 bp, or about 650 bp.

[0129] The resulting minicircles 18 are subjected to inverse PCR (step F, FIG. 1A), resulting in a linearized minicircle 24 that includes extension arm 52 and ligation arm 56 flanking the backbone sequences 60, 62 (and 50% of recombination site 64 and 50% of recombination site 66). The primers used in the inverted PCR step include a first primer 17 that hybridizes to the inverted PCR primer annealing site 54 (from preLASSO), and includes a restriction enzyme site (e.g., a Type IIS (shifted cleavage) restriction enzyme, such as BspQI, BsaI, BsmBI, BbsI, Esp3I, BtgZI, BspMI, BsmFI, SapI restriction enzyme site, which recognize an asymmetric DNA sequence and cleaves outside its recognition site located in the inverted PCR primer annealing site 54 and cleaves the 3′-5′(bottom strand) a DNA strand exactly at the 5′ end of the extension arm. while the 5′-3′ DNA strand (top strand) is cut inside the “inverted PCR primer annealing site), and a second primer 19 that hybridizes to the inverted PCR primer annealing site 54 (from preLASSO) and its first three 5′ bases have phosphorothioate bonds and that protect this DNA strand from Lambda exonuclease digestion, and includes a 3′-uracil final base (e.g., exemplary second primer 19 sequence A*T*C*GCCGCAAGAAGTGTU3′ SEQ ID NO: 3105). The 3′-terminal uracil is used for subsequent primer removal using Uracil-DNA Glycosylase (USER enzyme). As shown in steps G-L of FIG. 1A, the linearized minicircle 24 is treated to remove the 5′- and 3′-end primer annealing sites (FIG. 2A, 54) are removed to generate the mature ssDNA LASSO probe 30. For example, linearized minicircle 24 is digested with a restriction enzyme that recognizes an asymmetric DNA sequence and cleaves outside its recognition site located in the “inverted PCR primer annealing site” and cleaves the 3′-5′ (bottom strand) a DNA strand exactly at the 5′ end of the extension arm, while the 5′-3′ DNA strand (top strand) is cut inside the “inverted PCR primer annealing site” (for example using BspQI) to produce 26, a lambda exonuclease (e.g., T7 Exonuclease) to remove/digest the top 5′-3′ DNA strand that is not protected by the 5′ phosphorothioate bonds, to produce 28, and USER enzyme to remove the inverted primer annealing site (54 of FIG. 2A), thereby generating the mature ssDNA LASSO probe 30, which can be used for capture experiments. For example, ssDNA LASSO probe 30 can be used for parallel DNA target capture by 5′-3′ gap filling after annealing to target sequences that flank the desired DNA fragments, and the massively parallel capture of fragments can be used for sequencing or expression experiments. In some examples, massively parallel capture is includes four phases: hybridization, capture, purification of circularized targets, and post capture PCR amplification. Such a reaction can be performed in a PCR thermal cycler. During the hybridization, the target nucleic acid (e.g., genomic DNA or cDNA) is incubated with one or more mature LASSO probes 30 (e.g., mature ssDNA LASSO probe library). The capture is performed by adding a Gap Filling Mix directly into the hybridization reaction, which contains a polymerase (such as DNA polymerase, such as one having low strand displacement, such as Kapa HiFi) and a thermostable ligase (such as a DNA ligase). The Gap Filling Mix (e.g., a thermostable DNA ligase, a DNA polymerase, dNTPs, glycerol, buffer, wherein the glycerol stabilizes the mix and allows storage at −20 C for several months. In some examples, the ligase is used at 0.025 U/ul to 0.3 U/ul, such as 0.25 U/ul. The gap that is in between ligation arm and extension arm hybridization sites is filled by the polymerase using free nucleotides and the ends of the probe are ligated by the ligase, resulting in a fully circularized loop containing the target nucleic acid sequence. The ssDNA circles, representing the LASSO probes containing target nucleic acid molecule(s) are isolated from the rest of the linear template dsDNA or the unreacted LASSO probes by incubation with one or more exonucleases. To enrich the captured target(s), PCR amplification can be performed using as a template the capture reaction that was subjected to exonuclease digestion and universal primers that anneal to a portion of the backbone sequence 60, 62. The capture can be verified by examination of the post capture PCR product on agarose gel to verify the presence of the expected size of the targeted nucleic acid regions. For NGS analysis, the post capture PCR product is purified and subjected to enzymatic fragmentation. NebNext Ultra (NEB) or other commercial kits can be used to prepare the fragmented library for NGS sequencing. For downstream expression experiments, the post capture PCR product can be subjected to a second round of PCR amplification using tailed primers containing Gateway attB1 (AttB1 CapF, GGGGACAAGTTTGTACAAAAAAGCAGGCTtcACCGCTAAGCTCAAGGTCACA SEQ ID NO: 3110) and attB2 (AttB2 CapR, GGGACCACTTTGTACAAGAAAGCTGGGTcctaatCTTCCGTACCAGGAGAAGG G SEQ ID NO: 3111) sequences. The purified PCR product is mixed with the Gateway ‘donor vectors’ (pDONR221) and the BP Clonase enzyme mix (Invitrogen). The purified BP reaction can be used for E. coli electroporation to generate an entry clone library for downstream expression.

[0130] In the previous long adapter based assembly method 100 (FIG. 1B, 3A-3B, also see WO 2016/197065), the pre-LASSO probe 110 (FIG. 3B top) is similar to pre-LASSO probe 12. However, the pre-LASSO probe 12 used in the disclosed DNA recombinase mediated assembly method has different terminal sequence regions, with different functions. However, the central inverted PCR primer annealing site 54 is the same for both assembly methodologies. The long adapter sequence 112 (FIG. 1B, FIG. 3B, bottom) is a linear dsDNA sequence of ˜200-800 bp, but it is not a plasmid and does not contain any recombination sites. In the previous long adapter based assembly method 100, the long adapter 112 is attached to the pre-LASSO probe 110 via fusion PCR using primers that anneal in one end of the long adapter and one end of the pre-LASSO probe (step b, FIG. 1B). The fusion product 114 is subsequently digested with EcoR1 restriction enzyme that produces a fusion product with sticky ends 116 (step c, FIG. 1B). The fusion product with sticky ends 116 is circularized when T4 Ligase is added (step d, FIG. 1B), generating a DNA minicircle 118. Thus, both the disclosed DNA recombinase mediated assembly methods 10 and the previous long adapter based assembly methods 100 produce DNA minicircles 18 and 118. From this point, the assembly steps for both assembly approaches 10 and 100 are identical. As shown in FIG. 1B, the minicircles 118 are subjected to inverted PCR so that the annealing arms are made to flank the backbone sequence in the final configuration, the resulting linearized minicircle 120 subjected to BspQ1 digestion, lambda exonuclease digestion, and USER digestion, resulting in a mature ssDNA LASSO probe 128, which can be used for capture experiments. Mature ssDNA LASSO probe 128 differs from mature ssDNA LASSO probe 30 in that mature ssDNA LASSO probe 128 does not include a recombination site (e.g., no loxp site).

[0131] It is also shown herein that the target capture process efficiency can be increased by increasing the ligase concentration, for example by at least 2-fold, at least 3-fold, at least 5-fold, or at least 10-fold over prior methods (such as at least 10-fold, such as 0.25 U/μl). In some examples, a DNA polymerase with low strand displacement is used, such as Kapa HiFi polymerase, for example to capture targets up to about 5 Kb (such as 1 to 6 Kb, such as 1-5.5 Kb, 1-5 Kb, 1-4.5 Kb, 1-4 Kb, 1-2 Kb, or 1-3 Kb). It is also shown herein that when the melting temperature (Tₘ) of the extension arm and ligation arm are in the same range of 65-70° C., a greater percentage were able to capture homogeneously (MLD of 0.77) 96.26% of the targeted ORFs. In addition, these conditions resulted in a 315.69 fold enrichment of coverage for captured target versus coverage for captured non targeted ORFs. Thus, in some examples, the melting temperature (Tₘ) of the extension arm and ligation arm in the compositions and methods herein are in the same range of 65-70° C.

### Mature LASSO Probes

[0132] Provided herein are new single stranded (ss) DNA Long Adapter Single Stranded Oligonucleotide (LASSO) probes. Such probes include, from 5′ to 3′, (1) a ligation arm sequence complementary to a 5′ region of a target sequence, (2) a backbone sequence that is not complementary to the target sequence, and includes a recombination site (e.g., loxp, frt), and (3) an extension arm sequence at least 20 nt complementary to a 3′ region of the target sequence, wherein the ligation arm sequence and extension arm sequence are complementary to 5′ and 3′ regions of a single target sequence, respectively. In some examples, and the complementary regions a single target sequence are at least 100 nt apart, such as at least 200 nt, at least 300 nt, at least 400 nt, at least 500 nt, at least 600 nt, at least 700 nt, at least 800 nt, at least 1000 nt, at least 5000 nt, at least 10,000 nt, at least 20,000 nt, at least 30,000 nt, at least 50,000 nt, or at least 100,000 nt apart, such as 200-30,000 nt 100-500, 100-1000, 100-5,000, 100-10,000, 100-20,000, or 100-30,000 nt apart on the target sequence.

[0133] In some examples, the ligation arm sequence is at least 20 nt, at least 25 nt, at least 30 nt, or at least 40 nt, such as 20-40 nt. In some examples, the backbone sequence is at least 100 nt, at least 150 nt, at least 200 nt, at least 300 nt, at least 350 nt, at least 400 nt, at least 500 nt, at least 600 nt, at least 700 nt, at least 800 nt, or at least 1000 nt, such as 100-2500, 200-500, 200-2000, 200-2500, 200-1500, 200-1000, 200-800, 200-400 nt, 250-350 nt, 300-400 nt, or 250-300 nt. In some examples, the extension arm sequence is at least 20 nt, at least 25 nt, at least 30 nt, or at least 40 nt, such as 20-40 nt. In some examples, combinations of such lengths are used. In some examples, the ssDNA LASSO probe is at least 200 nt, at least 400 nt, at least 500 nt, at least 600 nt, at least 650 nt, at least 700 nt, or at least 800 nt, such as about 200 to 800 nt, 400 to 800 nt, or 500-700 nt.

[0134] In some examples, the target sequence is a DNA sequence, such as a coding or noncoding DNA sequence, for example cDNA or genomic DNA. In some examples, the target sequence is an RNA sequence, such as mRNA or miRNA sequence. In some examples, the target sequence is a complete or partial open reading frame, complete or partial intronic DNA regions, or a noncoding sequence such as lincRNA or regulatory RNA. In some examples, the target sequence is a prokaryotic nucleic acid sequence, such as a bacterial nucleic acid sequence. In some examples, the target sequence is a eukaryotic nucleic acid sequence, such as a mammalian nucleic acid sequence, fungal nucleic acid sequence, or a plant nucleic acid sequence, such as a human nucleic acid sequence. In some examples, the target sequence is a viral nucleic acid sequence. In some examples, the target sequence is a single contiguous target sequence, such as a genomic sequence, lncRNA, mRNA, or cDNA.

### Methods of Making ssDNA LASSO Probes

[0135] Provided herein are methods of generating the ssDNA LASSO probes described herein. Such methods utilize a double stranded pre-LASSO probe (e.g., see 12 in FIG. 1A) (such as one that is about 80-200 base pairs (bp) long, such as about 160 bp), having from 5′ to 3′(i) a first primer annealing site sequence, (ii) the extension arm sequence, (iii) an inverted PCR primer annealing site comprising a restriction site that allows for asymmetric cutting, (iv) the ligation arm sequence, and (v) a second primer annealing site sequence. In some examples, all or a subset of the pre-LASSO probes have the same primer annealing sequences. The methods also utilize a double stranded linear pLASSO vector (e.g., see 14 in FIG. 1A), having from 5′ to 3′ (e.g., “a” in 14 of FIG. 2A is the 5′ end) (i) the second primer annealing site sequence (i.e., the second primer annealing site sequence of the pre-LASSO probe), (ii) a first backbone region that does not substantially hybridize to the target sequence, (iii) a first recombination site, (iv) a selectable marker, (v) an origin of replication, (vi) a second recombination site, (vii) a second backbone region that does not substantially hybridize to the target sequence and (viii) the first primer annealing site sequence (i.e., the first primer annealing site sequence of the pre-LASSO probe), wherein the double stranded linear pLASSO vector further includes a nicking endonuclease recognition site (for example in the backbone), a restriction site not in the backbone (for example between the first recombination site and the selectable marker) used to digest a plasmid (e.g., SwaI), and optionally a first restriction endonuclease site (such as SalI) and a second restriction endonuclease site (such as BamHI).

[0136] The methods include contacting the ds DNA pre-LASSO probe with the ds linear pLASSO vector using sequence independent ligation conditions described above for step A in FIG. 1A, thereby generating a circular pLASSO vector containing the pre-LASSO probe (e.g., see 16 in FIG. 1A). The resulting circular pLASSO vector is introduced (e.g., transformed) into host cells, thereby generating transformed host cells comprising the circular pLASSO vector. The resulting transformed cells are grown in the presence of a growth media (such as solid or liquid media) containing reagents that do not permit growth of the host cells in the absence of the selectable marker (e.g., if the circular pLASSO vector contains an AmpR gene, the cells will grow in ampicillin media). The circular pLASSO vector is subsequently extracted or removed from the transformed host cells, and then contacted or incubated with a nicking endonuclease specific for the nicking endonuclease recognition site, under conditions that cleave one nucleic acid strand of the extracted circular pLASSO vector, thereby producing a relaxed circular pLASSO vector. The relaxed circular pLASSO vector is contacted or incubated with a recombinase specific for the first and second recombination sites (such as Cre or Flp), under conditions that recombination of the relaxed circular pLASSO vector occurs, thereby generating (i) a plasmid comprising a recombination site, the selection marker, and the origin of replication and (ii) a minicircle comprising the double stranded pre-LASSO probe, the first and second backbones, and a recombination site. The plasmid is digested with a restriction enzyme (the one used will be based on the restriction site in pLASSO 16 not in either backbone, such as SwaI (or other restriction enzyme) and exonuclease V. The minicircle is subjected to inverse PCR, using a first primer and a second primer that hybridize to the inverted PCR primer annealing site, wherein the first primer includes a restriction enzyme site (e.g., a Type IIS (shifted cleavage) restriction enzyme, such as BspQI, BsaI, BsmBI, BbsI, Esp3I, BtgZI, BspMI, BsmFI, SapI restriction enzyme site, which recognize an asymmetric DNA sequence and cleaves outside its recognition site located in the inverted PCR primer annealing site 54 and cleaves the 3′-5′(bottom strand) a DNA strand exactly at the 5′ end of the extension arm. while the 5′-3′ DNA strand (top strand) is cut inside the “inverted PCR primer annealing site) and wherein the second primer comprises a 3′-uracil and the first three 5′-end nt are modified nucleotides resistant to exonuclease treatment (e.g., connected by phosphorothioate bonds that are resistant to lambda exonuclease treatment), thereby generating a linear double stranded minicircle with a 5′ end and 3′ end, wherein the 5′ end of the linear double stranded minicircle is the first primer annealing site at the 3′ end of the linear double stranded minicircle is the second primer annealing site. The linear double stranded minicircle is subjected to conditions that (1) remove all or part of the first and second primer annealing sites from the 5′ and 3′ end of the linear double stranded minicircle by restriction digestion and/or glycosylase digestion and (2) remove one of the two strands of the digested linear double stranded minicircle, thereby producing the ssDNA LASSO.

[0137] In some examples, removing all or part of the first and second primer annealing sites from the 5′ and 3′ end of the linear double stranded minicircle includes removing all or part of the first and second primer annealing sites from the 5′ and 3′ end of the linear double stranded minicircle by restriction digestion and/or glycosylase digestion to produce a digested linear double stranded minicircle, and removing one of the two strands of the digested linear double stranded minicircle, thereby producing the ssDNA LASSO probe.

[0138] In some examples, removing one of the two strands of the digested linear double stranded minicircle includes using a lambda exonuclease.

[0139] In some examples, the double stranded pre-LASSO probe includes a plurality of double stranded pre-LASSO probes, and the method creates a library of ssDNA LASSOs that can target a plurality of nucleic acid sequences, such as at least 2, at least 10, at least 50, at least 100, at least 200, at least 1000, at least 10,000 at least, or at least 100,000 o different nucleic acid target sequences, for example in the same sample.

### Methods of Using ssDNA LASSO Probes

[0140] Also provided are methods of using the ssDNA LASSO probes generated using the disclosed methods. In some examples, the method includes using the ssDNA LASSO probes to detecting one or more target sequences. For example, such a method can include contacting a sample containing one or more target sequences with one or more ssDNA LASSO probes provided herein, wherein the ligation arm sequence and the extension arm sequence are complimentary to a 5′ region of the target sequence and to a 3′ region of the target sequence, respectively. The ligation arm sequence and extension arm sequence are allowed to hybridize to the target sequence. Gap filling is used to copy the target sequence between the ligation arm sequence and extension arm sequence using a polymerase (such as a DNA polymerase, such as one with low strand displacement, such as Kapa HiFi polymerase), thereby generating a ssDNA circle containing a copy the targeted DNA sequence. The resulting molecule is ligated, thereby generating a circular single stranded DNA fragment comprising the target sequence. The circular single-stranded DNA fragment comprising the target sequence is isolated, for example by digesting linear DNA in the sample (e.g., by adding directly to the capture reaction an aliquot of “linear DNA digestion solution” containing Exonuclease I, Exonuclease III and Lambda Exonuclease). The circular single stranded DNA fragment comprising the target sequences can then be amplified, for example using PCR, thereby detecting the target sequences (for example by detecting expected size DNA target sequence amplicons, e.g., using gel electrophoresis or the Bioanalizer).

[0141] In some examples, method detects a plurality of different target sequences, and the method includes contacting the sample comprising the target sequences with a plurality of ssDNA LASSOs, wherein the plurality of ssDNA LASSOs comprise sequences complementary to the different target sequences, such as at least 2, at least 10, at least 50, at least 100, at least 200, at least 1000, at least 10,000 at least, or at least 100,000 different nucleic acid target sequences, for example in the same sample.

[0142] In some examples, the target sequences are at least 200 nt long, such as at least 500, at least 1000, at least 5,000, at least 10,000, at least 20,000, at least 30,000, at least 50,000, at least 100,000, at least 500,000, at least 1,000,000 or more nt. In some examples, the hybridizing and the gap filling are performed at 55-75° C., such as 65° C.

[0143] In some examples, the sample includes eukaryotic or prokaryotic genomic DNA (gDNA), such as human gDNA. In one example, a sample includes mitochondrial DNA. Exemplary samples that can be used, include stool, tissue lysate, cell lysate, sputum, blood serum/plasma, bone marrow, saliva, and a tissue swab.

[0144] Also provided are libraries of target sequences generated by the disclosed methods.

[0145] The mature ssDNA LASSO probes provided herein can be used to target full-length open reading frames (ORFs) and genomic DNA, such as 100s or 1000s thousands full length ORF in a pooled format. In some examples, the target nucleic acid molecule is at least 1 kb, at least 2 kb, at least 3 kb, at least 4 kb, at least 5 kb, or more.

### Exemplary Target Nucleic Acid Molecules

[0146] In some examples the methods disclosed herein are used to detect a target nucleic acid molecule such DNA or RNA (such as cDNA, genomic DNA, mRNA, miRNA, etc.) in a eukaryote or prokaryote. Thus, in some examples, the extension and ligation arms of a pre-LASSO probe or mature LASSO probe have sufficient complementarity to hybridize to a target nucleic acid molecule (such as having at least 80%, at least 90%, at least 95%, at least 99%, or 100% sequence complementarity to the target) from a eukaryote or prokaryote, such as a pathogen or mammalian cells, such as a target nucleic acid molecule associate with a disease. For example, pathogens can have conserved DNA or RNA sequences specific to that pathogen (for example conserved sequences are known in the art for HIV, bird flu and swine flu), and cells may have specific DNA or RNA sequences unique to that cell. In some examples, a target nucleic acid molecule is associated with a disease or condition.

[0147] In specific non-limiting examples, the target nucleic acid sequence is associated with a tumor (for example, a cancer). Numerous chromosome abnormalities (including translocations and other rearrangements, reduplication (amplification) or deletion) have been identified in neoplastic cells, especially in cancer cells, such as B cell and T cell leukemias, lymphomas, breast cancer, ovarian cancer, colon cancer, neurological cancers and the like.

[0148] Exemplary target nucleic acids include, but are not limited to: the SYT gene located in the breakpoint region of chromosome 18q11.2 (common among synovial sarcoma soft tissue tumors); HER2, also known as c-erbB2 or HER2/neu (a representative human HER2 genomic sequence is provided at GENBANK® Accession No. NC_000017, nucleotides 35097919-35138441) (HER2 is amplified in human breast, ovarian, gastric, and other cancers); p16 (including D9S1749, D9S1747, p16(INK4A), p14(ARF), D9S1748, p15(INK4B), and D9S1752) (deleted in certain bladder cancers); EGFR (7p12; e.g., GENBANK® Accession No. NC_000007, nucleotides 55054219-55242525), MET (7q31; e.g., GENBANK® Accession No. NC_000007, nucleotides 116099695-116225676), C-MYC (8q24.21; e.g., GENBANK® Accession No. NC_000008, nucleotides 128817498-128822856), IGF1R (15q26.3; e.g., GENBANK® Accession No. NC_000015, nucleotides 97010284-97325282), D5S271 (5p15.2), KRAS (12p12.1; e.g. GENBANK® Accession No. NC_000012, complement, nucleotides 25249447-25295121), TYMS (18p11.32; e.g., GENBANK™ Accession No. NC_000018, nucleotides 647651-663492), CDK4 (12q14; e.g., GENBANK® Accession No. NC_000012, nucleotides 58142003-58146164, complement), CCND1 (11q13, GENBANK® Accession No. NC_000011, nucleotides 69455873-69469242), MYB (6q22-q23, GENBANK® Accession No. NC_000006, nucleotides 135502453-135540311), lipoprotein lipase (LPL) (8p22; e.g., GENBANK® Accession No. NC_000008, nucleotides 19840862-19869050), RB1 (13q14; e.g., GENBANK® Accession No. NC_000013, nucleotides 47775884-47954027), p53 (17p13.1; e.g., GENBANK® Accession No. NC_000017, complement, nucleotides 7512445-7531642), N-MYC (2p24; e.g., GENBANK® Accession No. NC_000002, complement, nucleotides 15998134-16004580), CHOP (12q13; e.g., GENBANK® Accession No. NC_000012, complement, nucleotides 56196638-56200567), FUS (16p11.2; e.g., GENBANK® Accession No. NC_000016, nucleotides 31098954-31110601), FKHR (13p14; e.g., GENBANK® Accession No. NC_000013, complement, nucleotides 40027817-40138734), aALK (2p23; e.g., GENBANK® Accession No. NC_000002, complement, nucleotides 29269144-29997936), Ig heavy chain, CCND1 (11913; e.g., GENBANK® Accession No. NC_000011, nucleotides 69165054-69178423), BCL2 (18q21.3; e.g., GENBANK® Accession No. NC_000018, complement, nucleotides 58941559-59137593), BCL6 (3q27; e.g., GENBANK® Accession No. NC_000003, complement, nucleotides 188921859-188946169), AP1 (1p32-p31; e.g., GENBANK® Accession No. NC_000001, complement, nucleotides 59019051-59022373), TOP2A (17q21-q22; e.g., GENBANK® Accession No. NC_000017, complement, nucleotides 35798321-35827695), TMPRSS (21q22.3; e.g., GENBANK® Accession No. NC_000021, complement, nucleotides 41758351-41801948), ERG (21q22.3; e.g., GENBANK® Accession No. NC_000021, complement, nucleotides 38675671-38955488); ETV1 (7p21.3; e.g., GENBANK® Accession No. NC_000007, complement, nucleotides 13897379-13995289), EWS (22q12.2; e.g., GENBANK™ Accession No. NC_000022, nucleotides 27994017-28026515); FLI1 (11q24.1-q24.3; e.g., GENBANK® Accession No. NC_000011, nucleotides 128069199-128187521), PAX3 (2q35-q37; e.g., GENBANK® Accession No. NC_000002, complement, nucleotides 222772851-222871944), PAX7 (1p36.2-p36.12; e.g., GENBANK® Accession No. NC_000001, nucleotides 18830087-18935219), PTEN (10q23.3; e.g., GENBANK® Accession No. NC_000010, nucleotides 89613175-89718512), AKT2 (19q13.1-q13.2; e.g., GENBANK® Accession No. NC_000019, complement, nucleotides 45428064-45483105), MYCL1 (1p34.2; e.g., GENBANK™ Accession No. NC_000001, complement, nucleotides 40133685-40140274), REL (2p13-p12; e.g., GENBANK® Accession No. NC_000002, nucleotides 60962256-61003682) and CSF1R (5q33-q35; e.g., GENBANK® Accession No. NC_000005, complement, nucleotides 149413051-149473128).

### Exemplary Pathogen/Microbe Nucleic Acid Molecule Targets

[0149] In some examples the methods disclosed herein are used to detect a nucleic acid molecule from a pathogen. Thus, in some examples, the extension and ligation arms of a pre-LASSO probe or mature LASSO probe are complementary to a target nucleic acid molecule from a pathogen. Any pathogen or microbe nucleic acid molecule can be detected using the methods and molecules provided herein. A non-limiting list of pathogens having nucleic acid molecules that can be detected using the methods and molecules provided herein are provided below.

[0150] For example, target nucleic acid molecule can be from a virus, such as positive-strand RNA viruses and negative-strand RNA viruses. Exemplary target positive-strand RNA viruses include, but are not limited to: Picornaviruses (such as Aphthoviridae [for example foot-and-mouth-disease virus (FMDV)]), Cardioviridae; Enteroviridae (such as Coxsackie viruses, Echoviruses, Enteroviruses, and Polioviruses); Rhinoviridae (Rhinoviruses)); Hepataviridae (Hepatitis A viruses); Togaviruses (examples of which include rubella; alphaviruses (such as Western equine encephalitis virus, Eastern equine encephalitis virus, and Venezuelan equine encephalitis virus)); Flaviviruses (examples of which include Dengue virus, West Nile virus, and Japanese encephalitis virus); Calciviridae (which includes Norovirus and Sapovirus); and Coronaviruses (examples of which include SARS coronaviruses, such as the Urbani strain, and SARS-CoV-2). Exemplary negative-strand RNA viruses include, but are not limited to: Orthomyxyoviruses (such as the influenza virus), Rhabdoviruses (such as Rabies virus), and Paramyxoviruses (examples of which include measles virus, respiratory syncytial virus, and parainfluenza viruses).

[0151] Viruses also include DNA viruses. DNA viruses include, but are not limited to: Herpesviruses (such as Varicella-zoster virus, for example the Oka strain; cytomegalovirus; and Herpes simplex virus (HSV) types 1 and 2), Adenoviruses (such as Adenovirus type 1 and Adenovirus type 41), Poxviruses (such as Vaccinia virus), and Parvoviruses (such as Parvovirus B19).

[0152] Another group of viruses includes Retroviruses. Examples of retroviruses include, but are not limited to: human immunodeficiency virus type 1 (HIV-1), such as subtype C; HIV-2; equine infectious anemia virus; feline immunodeficiency virus (FIV); feline leukemia viruses (FeLV); simian immunodeficiency virus (SIV); and avian sarcoma virus.

[0153] In one example, a target nucleic acid molecule is from one or more of the following: HIV-1; Hepatitis A virus; Hepatitis B (HB) virus; Hepatitis C (HC) virus; Hepatitis D (HD) virus; a respiratory virus (such as influenza A & B, respiratory syncytial virus, human parainfluenza virus, human metapneumovirus, severe acute respiratory syndrome coronavirus (SARS-CoV-1), or SARS-CoV-2), or West Nile Virus.

[0154] Pathogens also include bacteria. Bacteria can be classified as gram-negative or gram-positive. Exemplary target gram-negative bacteria include, but are not limited to: Escherichia coli (e.g., K-12 and O157:H7), Shigella dysenteriae, and Vibrio cholerae. Exemplary target gram-positive bacteria include, but are not limited to: Bacillus anthracis, Staphylococcus aureus, Listeria, pneumococcus, gonococcus, and streptococcal meningitis. In one example, a target nucleic acid molecule is from one or more of Group A Streptococcus; Group B Streptococcus; Helicobacter pylori; Methicillin-resistant Staphylococcus aureus; vancomycin-resistant enterococci; Clostridium difficile; E. coli (e.g., Shiga toxin producing strains); Listeria; Salmonella; Campylobacter; B. anthracis (such as spores); Chlamydia trachomatis; Ebola, or Neisseria gonorrhoeae.

[0155] Protozoa, nemotodes, and fungi are also types of pathogens. In some examples, a target nucleic acid molecule is from one or more of Plasmodium (e.g., Plasmodium falciparum to diagnose malaria), Leishmania, Acanthamoeba, Giardia, Entamoeba, Cryptosporidium, Isospora, Balantidium, Trichomonas, Trypanosoma (e.g., Trypanosoma brucei), Naegleria, or Toxoplasma. In some examples, a target nucleic acid molecule is from one or more of Coccidiodes immitis or Blastomyces dermatitidis.

### Exemplary Samples

[0156] Any biological, food, or environmental specimen that may contain (or is known to contain or is suspected of containing) a target nucleic acid molecule can be used in the methods herein. Samples can also include fermentation fluid, reaction fluids (such as those used to produce desired compounds, such as a pharmaceutical agents), and tissue or organ culture fluid.

[0157] Biological samples are usually obtained from a subject and can include genomic DNA, RNA (including mRNA), protein, cells, or combinations thereof. Examples include a tissue or tumor biopsy, fine needle aspirate, bronchoalveolar lavage, pleural fluid, spinal fluid, saliva, sputum, surgical specimen, lymph node fluid, ascites fluid, peripheral blood (such as serum or plasma), bone marrow, urine, semen, buccal swab, and autopsy material. Techniques for acquisition of such samples are known in the art (for example see Schluger et al. J. Exp. Med. 176:1327-33, 1992, for the collection of serum samples). Serum or other blood fractions can be prepared in the conventional manner. Thus, using the methods provided herein, target nucleic acid molecule in the body can be detected.

[0158] Environmental samples include those obtained from an environmental media, such as water, air, soil, dust, wood, plants, or food (such as a swab of such a sample). In one example, the sample is a swab obtained from a surface, such as a surface found in a building or home. Thus, using the methods provided herein, microbes found in the environment can be detected, such as a pathogen.

[0159] In one example the sample is a food sample, such as a meat, dairy, fruit, or vegetable sample. For example, using the methods provided herein, adulterants in food products can be detected, such as a pathogen or toxin. For example, beverages (such as milk, cream, soda, bottled water, flavored water, juice, and the like), and other liquid or semi-liquid products (such as yogurt) can be analyzed with the methods provided herein.

[0160] In one example the sample is a sample from a chemical reaction, such as one used to produce desired compounds, such as a pharmaceutical agent, such as a biologic.

[0161] In other examples, a sample includes a control sample, such as a sample known to contain, or not contain, a particular amount of the target nucleic acid molecule.

[0162] Once a sample has been obtained, the sample can be used directly, concentrated (for example by centrifugation or filtration), purified, liquefied, diluted in a fluid, or combinations thereof. In some examples, proteins, cells, nucleic acids, or pathogens are extracted from the sample, and the resulting preparation (such as one that includes isolated cells, pathogens, DNA, or RNA) analyzed using the methods provided herein.

### Compositions and Kits

[0163] Also provided are compositions that include one or more of the disclosed ssDNA LASSO probes, such as those that include a pharmaceutically acceptable carrier (e.g., water, saline). In some examples, a composition includes a plurality of ssDNA LASSO probes, having ligation and extension arm sequences complementary to at least 2, at least 3, at least 4, at least 5, at least 10, at least 50, at least 100, at least 500, at least at least 1000, at least 10,000, at least 100,000, or at least at least 100,000,000 different target sequences. Such compositions can be in a container, such as a glass or plastic container, wherein the composition is liquid, frozen, or freeze-dried.

[0164] Also provided are kits that include one or more of the disclosed ssDNA LASSO probes (or compositions). Such kits can include other elements, such as one or more endonucleases, one or more exonucleases, one or more polymerases (such as a DNA polymerase, such as one with low strand displacement, such as Kapa HiFi polymerase), one or more ligases, one or more recombinases; one or more reagents for PCR, or combinations thereof. In specific examples, the kit includes one or more of the disclosed ssDNA LASSOs probes (such as a probe library), and one or more of a gap filling mix (e.g., a thermostable DNA ligase, a DNA polymerase [such as one with low strand displacement, such as Kapa HiFi polymerase]), dNTPs, glycerol, buffer), linear DNA digestion solution (e.g., Exonucleases I, III and Lambda, buffer and glycerol), oligonucleotide primers for post capture PCR reaction, post capture PCR master mix (e.g., DNA polymerase, dNTPs and buffer), and a positive control for the capture reaction (e.g., a LASSO probe that captures 1 kb target sequence within the genome of the phage M13mp18 single stranded DNA, or the LASSO probe and an aliquot of M13mp18 single stranded DNA (New England Biolab N4040S)). In some examples, the elements of the kit are in separate containers.

### Example 1

### Pre-LASSO Probe Amplification

[0165] This example describes methods that can be used to amplify a pre-LASSO probe (e.g., 12 in FIG. 1A, 2A-2B, 2D).

[0166] A stock solution of pre-LASSO probe Oligo Pool is prepped by re-suspending in 10 mM Tris buffer, pH 8.0 to a concentration of at least 20 ng/μL. Stock solution concentration (ng/μL)=Total yield (ng)/resuspension volume (μL). The KAPA HiFi HotStart PCR Kit can be used to perform PCR using the pre-LASSO primer pair with the primer annealing site of the pre-LASSO library. If the pre-LASSO library is composed of different sub-libraries, use the appropriate pre-LASSO primers pairs to select the sub-library of choice.

[0167] The PCR reaction is as follows:

| | FINAL | PER 25 μL |
|---|---|---|
| COMPONENT | CONCENTRATION | REACTION |
| 5× KAPA HiFi Fidelity | 1× | 5.0 μL |
| Buffer | | |
| 10 mM each dNTP Mix | 0.3 mM each dNTP | 0.75 μL |
| 10 μM Forward Primer | 0.3 μM | 0.75 μL |
| 10 μM Reverse primer | 0.3 μM | 0.75 μL |
| Twist Oligo Pool (20 ng/μL) | 0.4 ng/μL | 0.5 μL |
| KAPA HiFi HotStart DNA | 0.5 U/reaction | 0.5 μL |
| Polymerase (1 U/μL) | | |
| PCR grade water | — | Fill to 25 μL |

[0168] PCR Reaction Conditions

| CYCLING | | | |
|---|---|---|---|
| STEP | TEMPERATURE | | DURATION |
| 1 | Initialization | 3 min at 95° C. | 1× |
| | Denaturation | | |
| 2 | Denaturation | 20 sec at 98° C. | 6-12 Cycles** |
| 3 | Annealing | 15 sec at 58° C. | |
| 4 | Extension | 15 sec at 72° C. | |
| 5 | Final Extension | 1 min at 72° C. | 1× |

[0169] Perform quality analysis of pre-LASSO probe library by running the PCR product on a 2.5% agrose gel and verify the presence of the correct size of the amplicon an optimized PCR-amplified oligo pool yields a strong DNA band/peak at the correct size (FIG. 4). The same analysis can be also performed by suing a Agilent® 2100 Bioanalyzer.

[0170] A clean peak at the expected size indicates effective oligo pool amplification. Multiple side peaks indicate non-specific amplification. Repeat PCR with higher annealing temperature to increase specificity, or re-design PCR primers. The presence of a hump after the peak of interest indicates heteroduplexes, a result of over-amplification. Re-try PCR with lower number of cycles

[0171] Purify the PCR reactions with AMPure magnetic beads using a high bead-to-DNA ratio (1.8×)

[0172] Add 1.8× AMPure magnetic beads (45 μL of beads) to the sample and gently mix. Incubate the sample with the beads at room temperature for 5 min. Condense the beads into a pellet with the magnet for 3-5 min. Remove and discard the supernatant without disturbing the beads, leaving ˜3 μL behind a. Keep the beads pelleted until the elution step; do not disturb the pellet. Pipette 200 μL of 80% (vol/vol) ethanol without disturbing the beads, and keep them pelleted. Leave the ethanol on the beads for 30 sec; then remove and discard the ethanol. Repeat the wash (for a total of two ethanol washes). Remove as much of the ethanol as possible. Air-dry the pellet for ˜1 min.

[0173] Add 25 μL of nuclease-free water to the sample and then pipet 15 times to mix. Repeat the mixing to ensure better recovery. Incubate at room temperature for 5 min. Condense beads into a pellet with the magnet for 3-5 min. Collect the supernatant into a new tube Quantify the concentration of the purified PCR product using a Nanodrop. The purified PCR product can be stored at −20° C.

### Example 2

### pLASSO Vector Generation

[0174] This example describes methods that can be used to generate a pLASSO vector (e.g., 14 in FIGS. 1A, 2).

[0175] In a PCR tube add 2.5 μl, 50 ng of pLox2+ linear plasmid, 1 unit of T4 DNA ligase, nuclease-free water to 25 μl total volume. Add T4 ligase last. Incubate overnight at 16° C. Thaw a vial of 5-alpha chemically competent E. coli cells (New England BioLabs, cat. no. C2989K) on ice and add 50 μL in an ice pre chilled MicroPulser Cuvette 0.1 cm gap. Add 0.5 μl of the overnight ligation reaction and perform electroporation using an electroporator. Subsequently, add 950 μL of 37° C. pre-warmed SOC medium and shake a 200 RPM for 1 h at 37° C. Plate 100 μl of the SOC medium on an ampicillin Agar plate and incubate ON at 37° C. Single colonies from ampicillin agar plate are collected and used to inoculate 5 ml of LB medium with ampicillin in a Corning tube and shake at 200 RPM ON at 37° C. Perform plasmid extraction using the PureLink Quick Plasmid Miniprep Kit as described by the vendor.

[0176] The resulting digestion of pLox2+ is incubated with:

### Component

[0177] EcoRI restriction enzyme

### Alkaline Phosphatase, Calf Intestinal,

[0178] 5 μL of CutSmart buffer,
500 ng of pLox2+
Nuclease free water to 25 ul

[0179] The reaction is incubated in a thermal cycler at 37° C. for 1 h and then heat inactivated at 80° C. for 10 min. Following amplification, the vector (10 ul of digestion) is analyzed using a 1% agarose gel d run at 100V for 30 min (⅔ of the gel). DNA bands of ˜2.9 kb and ˜750 bp should be present in the gel as shown in FIG. 5. The 2.9 kb DNA fragment of pLox2+ is removed from the gel and purified using a Gel/PCR DNA Fragments Extraction Kit, and the final DNA concentration quantified.

[0180] Digest 100 ng of the synthetic dsDNA fragment EcoRI Backbone (a synthetic DNA fragment cloned in pLox2+ to generate pLASSO; see “Backbone” in blue in pLASSO the sequence FIG. 2E) with 1 unit of EcoRI restriction enzyme in 25 ul of 1× CutSmart buffer at 37° C. for one hour and purify by using DNA Purification SPRI Magnetic Beads as described by the vendor, and quantify the final DNA concentration. The 2.9 kb DNA fragment of pLox2+ generated above is ligated with the EcoRI Backbone using the conditions below and incubated at 16° C. overnight.

| | Amount | |
|---|---|---|
| | per 25 μL | Final |
| Component | reaction | concentration |
| 2.9 kp fragment from pLox2 | 40 ng | 1.6 ng/μL |
| EcoR1 Backbone | 10 ng | 0.5 ng/μL |
| 10× T4 DNA Ligase Buffer | 2.5 μL | 1× |
| T4 DNA Ligase | 1 μL | 16 units/μL |
| PCR grade water | Fill to 25 μL | |

[0181] The ON ligation reaction (0.5 μL) is used for transformation of 5-alpha chemically competent E. coli cells. Following transformation, cells are gown on an ampicillin resistance selective agar plates. Colonies (up to 5) from the ampicillin selective agar plates are collected and used to inoculate LB medium containing ampicillin and shake at 200 RPM ON at 37° C. From the broth cultures, extract pLASSO performing plasmid extraction using the PureLink Quick Plasmid Miniprep Kit as described by the vendor and quantify the final DNA concentration. The correct assembly of pLASSO is determined by performing digestions of ˜500 ng of pLASSO with SalI, EcoR1, SwaI restriction enzymes, and analyzing the fragments using electrophoresis and a 1% agarose gel (FIG. 6). As shown in FIG. 6, SwaI generates a single fragment of 3205 bp, and EcoRI generates a fragments of 338 bp and 2867 bp, and SalI+Swa1 generate 1627 bp and 1577 bp fragments. The resulting assembled pLASSO vector can be stored at −80° C. (differs from pLASSO 14 of FIGS. 1A, 2A-2C, in that this is the covalently closed form; it does not have the “a” and “b” selectors that are attached by PCR during linearization).

[0182] The resulting assembled pLASSO vector is linearized to generate the final pLASSO vector 14 in FIGS. 1A, 2. The following PCR reaction is performed:

| | FINAL | PER 25 μL |
|---|---|---|
| COMPONENT | CONCENTRATION | REACTION |
| 5× KAPA HiFi Fidelity | 1× | 5.0 μL |
| Buffer | | |
| 10 mM each dNTP Mix | 0.3 mM each dNTP | 0.75 μL |
| 10 μM NEB1F Primer | 0.3 μM | 0.75 μL |
| 10 μM NEB1R primer | 0.3 μM | 0.75 μL |
| 0.5 ng of pLASSO | 0.4 ng/μL | 0.5 μL |
| KAPA HiFi HotStart | 0.5 units/reaction | 0.5 μL |
| DNA Polymerase | | |
| (1 unit/μL) | | |
| PCR grade water | — | Fill to 25 μL |

[0183] PCR Reaction Conditions

| CYCLING | | | |
|---|---|---|---|
| STEP | TEMPERATURE | | DURATION |
| 1 | Initialization | 4 min at 95° C. | 1× |
| | Denaturation | | |
| 2 | Denaturation | 20 sec at 95° C. | 28 Cycles |
| 3 | Annealing | 20 sec at 60° C. | |
| 4 | Extension | 2 min at 72° C. | |
| 5 | Final Extension | 3 min at 72° C. | 1× |

[0184] The correct linearized pLASSO structure is confirmed by analyzing the PCR product on a 0.8% agarose gel. The PCR-linearized pLASSO yields a strong DNA band of ˜3.3 kb (FIG. 7). The PCR-linearized pLASSO can be stored at −20° C.

### Example 3

### Mature Ss DNA LASSO Probe Generation

[0185] This example describes methods that can be used to generate a mature ssDNA LASSO probe (e.g., 30 in FIGS. 1A, 2).

### Biological Material

[0186] 5-alpha chemically competent E. coli cells (New England BioLabs, cat. no. C2989K)
[0187] 5-alpha Electrocompetent E. coli, high efficiency (New England BioLabs, cat. no. C2987I) Escherichia Coli K12 (strain ATCC 27355)

### Reagents

[0188] pre-LASSO library (Twist Bioscience; see SEQ ID NOS: 1-3088 for the design of the pre-LASSO probes)
[0189] M13mp18 Single-stranded DNA (New England BioLabs, cat. no. N4040S)
[0190] pre-LASSO M13 (the positive control for capture experiments see DNA sequence below SEQ ID NO: 3091)
[0191] KAPA HiFi HotStart PCR Kit (Catalog #KK2502)
[0192] Omni Klentaq LA (DNA Polymerase Technology cat. 350)
[0193] Recombinant Bacteriophage P1 Cre recombinase protein (ABCAM cat. no. ab134845)
[0194] Deoxynucleotide (dNTPs) solution Mix (New England BioLabs, cat. no. M0210S)
[0195] CutSmart buffer R3101S B7204S)
[0196] Cre Recombinase Reaction Buffer (New England BioLabs, cat. no. M0298S NEB, only available with Cre recombinase)
[0197] EcoRI HF (New England BioLabs, cat. no. R3101S)
[0198] SalI (New England BioLabs, cat. no. R0138S)
[0199] BamHI (New England BioLabs, cat. no. R0136S)
[0200] SwaI (New England BioLabs, cat. no. R0604)
[0201] BspQI (New England BioLabs, cat. no. R0712S)
[0202] Nt.BbvCI nicking endonuclease (New England BioLabs, cat. no. R0632S)
[0203] T4 DNA Ligase (New England BioLabs, cat. no. M0202S)
[0204] Ampligase DNA Ligase (100 units/μl) (Lucigen Corporation cat. no. A0102K)
[0205] Ampligase 10× Reaction Buffer (Lucigen Corporation cat. no. A1905B)
[0206] Lambda Exonuclease (New England BioLabs, cat. no. M0262S)
[0207] Exonuclease V (RecBCD) (New England BioLabs, cat. no. M0345S)
[0208] USER enzyme (New England BioLabs, cat. no. M5505S)
[0209] Adenosine 5′-Triphosphate (ATP) 10 mM (New England BioLabs, cat. no. P0756S)
[0210] NEBNext dsDNA Fragmentase (New England BioLabs, cat. no. M0348S)
[0211] Gel/PCR DNA Fragment Extraction Kit (IBI scientific cat. no. 1B47010)
[0212] UltraPure Ethidium Bromide, 10 mg/mL (Thermo Fischer Scientific, cat. no. 15585011)
[0213] SOC outgrowth medium (New England BioLabs, cat. no. B9020S)
[0214] PureLink Quick Plasmid Miniprep Kit (thermos Scientific, cat. no. K210010)
[0215] Difco, LB Broth Miller (Luria-Bertani), 500 g (Sigma Aldrich L3522)
[0216] pLox2+ (linearized) (it comes together with Cre Recombinase New England BioLabs, cat. no. M0298S)
[0217] M13mp18 Single-stranded DNA (New England BioLabs, cat. no. N4040S)

### Equipment

[0218] Accuris myGel™ Mini Agarose Gel Electrophoresis Apparatus (Accuris Instruments, cat. no. E1101)
[0219] Accuris UV Transilluminator (Accuris Instruments, cat. no. E3000) !CAUTION Always wear UV-light-protective safety glasses/face shield.
[0220] Accuris SmartDoc 2.0 Imaging Enclosure (Accuris Instruments, cat. no. E5001-SD)
[0221] Accuris SmartDoc 2.0 System with Blue Light Illumination Base, 115V (Accuris Instruments, cat. no. E5001-SDB)
[0222] SmartDoc band pass filter, 590 nm, for imaging EtBR on UV transilluminator (Accuris Instruments, cat. no. EE5001-590)
[0223] MicroPulser electroporation apparatus (Biorad, cat. no. 165-2100)
[0224] Gene Pulser/MicroPulser Cuvette 0.1 cm gap (Biorad, cat. no. 165-2089)
[0225] AMPure XP for PCR Purification (Beckman Coulter Life Sciences)

### Reagent Setup

[0226] Oligos and primers
[0227] Resuspend IDT DNA oligos (SEQ ID NOS: 3104 and 3105 [sap1F and ThiolR above])) and primers to 100 μM in nuclease-free water. Dilute to a 10 μM concentration by adding 10 μL of 100 μM primers to 90 μL of nuclease-free water. DNA oligos and primers can be stored at 10 μM or 100 μM at −20° C. for up to 2 years.

[0228] 1×TAE Buffer
[0229] Mix 100 mL of 10×TAE with 900 mL of water for 1 L of 1×TAE. Store at room temperature (25° C.) until expiration date on packaging.

[0230] 80% (Vol/Vol) Ethanol Solution
[0231] Mix 8 mL of ethyl alcohol (pure, 200 proof) with 2 mL of nuclease-free water to obtain 1 mL of 70% (vol/vol) ethanol right before use.

[0232] CRE Recombinase (ABCAM)

[0233] Aliquot in PCR tubes in 4 μl aliquots and store at −80° C.

### Gap Filling Mix

[0234] Prepare Gap Filling Mix assembling the component with the order shown in table, vortex and store at −20° C. for up to three months

| | | Amount PER |
|---|---|---|
| ORDER | COMPONENT | 1 ml Stock |
| 1 | PCR grade Water | 791 μl |
| 2 | 10X Ampligase | 100 μl |
| | DNA ligase Buffer | |
| 3 | 10 mM dNTPs | 4 μl |
| 4 | Ampligase DNA | 1 μl |
| | Ligase (5 U/ul) | |
| 5 | TaqDNA | 4 μl |
| | Polymerase | |
| 6 | Glycerol | 100 μl |

### Digestion Mix

[0235] Prepare Digestion Mix assembling the component with the order shown in table, vortex and store at −20° C. for up to three months

| | | Amount PER |
|---|---|---|
| ORDER | COMPONENT | 1 ml Stock |
| 1 | PCR grade Water | 120 μl |
| 2 | Exonuclease I | 40 μl |
| 3 | Lambda Exonuclease | 40 μl |
| 4 | Exonuclease III | 40 μl |

### Agarose Gel

[0236] Mix 0.6 g for 1.2% (wt/vol) agarose with 50 mL of 1×TAE, heat in microwave until agarose completely dissolves, add 1.5 μL of ethidium bromide (10 mg/mL) pour the solution into the casting box with the comb positioned, and cool at room temperature for at least 20 min until the gel solidifies.

### Oligonucleotide List

| Name | Sequence 5′-3′ |
|---|---|
| EcoRI Backbone | TCGAGGAATTCAGAGAAGTCATCAAAGAGTTTAAAGA |
| (SEQ ID NO: 3089) | GTTTATGAGATTTAAGGTCAAGACAACGAGACACGAGT |
| | TCGAGATTGAGGGAGAGAAGGCCCCTCAGCGGCCTTAT |
| | AACTATAACGGTCCTAAGGTAGCGAACGAACAAACCG |
| | CTAAGCTCAAGGTCACAAAAGGTCGACGAGGACCCGG |
| | ATCCCTCCCCTTCTCCTGGTACGGAAGCAAAGCCTATG |
| | TTAAACACTGACTATCTGAAGCTCTCCTTCCCTGAAGG |
| | CTTGAGAGATTCATGAACTTCGAGGAAGGACGGAGAG |
| | TTTATTTATAAGGAACCAACTTCCCCTCCGATGGCCCTG |
| | TCATGAATTCT |
| Pre-LASSO 1 | CAGACGACGGCCAGTGTCGACNAACACTTCTTGCGGCG |
| (SEQ ID NO: 3090) | ATGGTTCCTGGCTCTTCGATCNGGATCCTACGGTCATTC |
| | AGC |
| pre-LASSO M13 | CAGACGACGGCCAGTGTCGACTTGGAGTTTGCTTCCGG |
| (SEQ ID NO: 3091) | TCTGGTTCGAACACTTCTTGCGGCGATGGTTCCTGGCTC |
| | TTCGATCGCCGTTGCTACCCTCGTTCCGATGCGGATCCT |
| | ACGGTCATTCAGC |
| Pre-LASSO GAPDH | CAGACGACGGCCAGTGTCGACGGTGAAGGTCGGAGTCA |
| (SEQ ID NO: 3092) | ACGGATTTGGTCGAACACTTCTTGCGGCGATGGTTCCTG |
| | GCTCTTCGATCGGAAGAGAGAGACCCTCACTGCTGGGG |
| | GGATCCTACGGTCATTCAGC |
| Pre-LASSO F-Actin | CAGACGACGGCCAGTGTCGACATGGAAGAAGAGATCG |
| (SEQ ID NO: 3093) | CCGCGCTGGAACACTTCTTGCGGCGATGGTTCCTGGCTC |
| | TTCGATCCCCCCAGAGCGCAAGTACTCGGTGTGGATCCT |
| | ACGGTCATTCAGC |
| Selector a | CAGACGACGGCCAGTGTC |
| (SEQ ID NO: 3094) | |
| Selector b | GCTGAATGACCGTAGGATCC |
| (SEQ ID NO: 3095) | |
| Selector c | AAATGCGACCCCGAATG |
| (SEQ ID NO: 3096) | |
| Selector d | CTATGGGATGCGATGGGAT |
| (SEQ ID NO: 3097) | |
| Selector e | GTATTGGCAGGGTCTCCG |
| (SEQ ID NO: 3098) | |
| Selector f | GAGGGGTCACACCTCCG |
| (SEQ ID NO: 3099) | |
| Selector g | CGCAAGGAATCTGCCTAACC |
| (SEQ ID NO: 3100) | |
| Selector h | ATTTTCAGATCGCGACCATTG |
| (SEQ ID NO: 3101) | |
| pLASSO | GGATCCTACGGTCATTCAGCCTCCCCTTCTCCTGGTACG |
| linearization a | GAAGCAA |
| (SEQ ID NO: 3102) | |
| pLASSO | GTCGACACTGGCCGTCGTCTGCTTTTGTGACCTTGAGCT |
| linearization b | TAGCGGT |
| (SEQ ID NO: 3103) | |
| SapIF | GGTTCCTGGCTCTTCGATC |
| (SEQ ID NO: 3104) | |
| ThiolR | A*T*C*GCCGCAAGAAGTGTU (indicates phosphorothioate |
| (SEQ ID NO: 3105) | bonds) |
| PostCaptR | CTTCCGTACCAGGAGAAGGG |
| (SEQ ID NO: 3106) | |
| PostCaptF | ACCGCTAAGCTCAAGGTCACA |
| (SEQ ID NO: 3107) | |
| Neb1F | AGCCTCCCCTTCTCCTGGGATCCTACGGTCATTCGTACG |
| (SEQ ID NO: 3108) | GAAGCAA |
| Neb1R | TTTTGTGACCTTGAGCTTAGCGGTGTCGACACTGGCCG |
| (SEQ ID NO: 3109) | TCGTCTGC |

Software: pre-LASSO calculator software

### Procedure

[0238] Cloning in pLASSO
[0239] 1. Thaw on ice with the pre LASSO library pre-amplified as described in Example 1 and pLASSO obtained as described in Example 2

[0240] In parallel with the assembly of the LASSO library(s) perform, in a separate tube, the assembly LASSO M13 starting from pre-LASSOM13 (SEQ ID NOS3104 and 3105) and pLASSO linearized with NEB1F and NEB1R primers (SEQ ID NOS: 3108 and 3109). LASSO M13 will be used as positive control for subsequent capture experiments. Since pre lasso pre-LASSOM13 is purchased as a dsDNA oligo (Gblock, IDT) it does not need to be pre-amplified, thus start the assembly directly from the cloning at step 25 below
[0241] 2. For each pre-LASSO library set up a PCR with the following NebBuilder assembly reaction. Include a separate tube for pre-LASSO M13

### Neb Builder Reaction Components

| | | PER 20 μL |
|---|---|---|
| COMPONENT | Amount | REACTION |
| Linearized pLASSO | ~50 ng | 2.5 ng/μL |
| Pre-LASSO library | ~16 ng | 0.8 ng/μL |
| (pre-LASSO M13) | | |
| NEBuilderHiFi DNA Assembly | 10 μL | 1X |
| Master Mix 2X | | |
| PCR grade water | Fill to 20 μL | |

[0243] 3. Incubate in a PCR thermal cycler at 50° C. for 15 minutes. Following incubation, store samples on ice or at −20° C. for subsequent transformation

[0244] E. coli Transformation
[0245] 4. Prepare LB agar plates with ampicillin (optimally by dispensing 40 ml of LAB agar 100 μg/ml ampicillin). Once the once the agar is solidified incubate at 37° C.
[0246] 5. Thaw NEB 5-alpha electro competent cells on Ice. Transfer 50 μL of electro competent cells to a pre-chilled electroporation cuvette with 1 mm gap, Add 1 μL of the assembly product above to electro competent cells. Mix gently by pipetting up and down. Once DNA is added to the cells, electroporation immediately. Add 950 μL of room-temperature SOC media to the cuvette immediately after electroporation. Place the tube at 37° C. for 60 minutes. Shake vigorously (250 rpm) or rotate. Warm selection plates to 37° C. Include a pUC19 NEB positive control for electroporation (provided with electrocompetent cells)
[0247] 6. Plate 900 μL of the SOC medium containing transformed E. coli cells in two pre warmed petri dishes (2×-450 μL) and incubate overnight at 37° C. Use the remaining ˜100 μL volume to make 1/10 and 1/100 serial dilutions in fresh SOC medium and plate the 1/10 and 1/100 in smaller petri dishes and Incubate overnight at 37° C.
[0248] 7. The day after estimate the number of colonies in the petri dishes by counting the E. coli colonies in the dilution plates.

[0249] To ensure a uniform representation of all probes in the final LASSO library, the number of the E. coli colonies in selection agar plates should be 10 times the number of pre-LASSO probes in the library (e.g., a 4000 different pre-LASSO probe library needs 40,000 colonies). If the total number of colonies is lower than 10 times the number of pre-LASSO probes, go back to step 5, perform multiple electroporations to reach the required number of colonies and plate in a larger number of petri dishes.

[0250] If the number of colonies in the dilution plate is too low whereas the pUC19 control plate have high number of colonies double check that the pLASSO was linearized by using the correct adapters for the pre-LASSO library of choice. Verify identity, purity and concentration of both linearized pLASSO and pre-LASSO library.
[0251] 8. Harvest E. coli colonies from agar plates by spreading ˜10 ml or larger volume of sterile water on selection agar plates, scrape colonies by using a glass or a plastic spreader. Collect the E. coli solution and dispense the same library in a single 50 ml Corning tube.
[0252] 9. Pellet the E. coli cells by centrifugation and resuspend the cell in Resuspension Buffer R3 (PureLink quick Plasmid Miniprep Kit) by using 250 μl of R3 Buffer every 5 ml of the E. coli solution. Dispense the resuspended cells in 300 ul aliquots in 1.5 ml Eppendorf tubes than follow the lysis protocol as described by the Invitrogen PureLink quick Plasmid Miniprep Kit.
[0253] 10. Quantify the concentration of the eluted library. Can store at −20° C.
[0254] 11. Verify successful cloning of the pre-LASSO pool into pLASSO by setting up a double digestion (see table below) in 25 μl of 1× cut Smart Buffer using 500 ng of the recovered pLASSO library, 1 μl of SalI and 1 μl BamHI. Digest for 1 h at 37° C. Perform gel electrophoresis by loading 4 μL of the digestion in a 2% agarose gel. If the cloning of the pre-LASSO library was successful, a DNA band having the size of the pre-LASSO library (˜160 bp) should be present (FIG. 8).
   Components for the pLASSO Digestion

| | | | FINAL |
|---|---|---|---|
| COMPONENT | | | CONCENTRATION |
| pLASSO cloned library | 500 | ng | 2.5 ng/μL |
| CutSmart Buffer | 2.5 | μL | 1X |
| Sail restriction enzyme | 20 | units | 0.8 units/μl |
| BamHI restriction enzyme | 20 | units | 0.8 units/μl |
| Nuclease free water | | | Fill to 25 μL |

### Nicking

[0255] 12. Perform nicking endonuclease digestion of the pLASSO library as follows

| | | FINAL |
|---|---|---|
| COMPONENT | AMOUNT | CONCENTRATION |
| pLASSO library | 2 μg | 4 ng/μL |
| CutSmart Buffer | 5 μL | 1X |
| Nt.BbvCI (10 units/μL) | 1 μL | 0.4 U/μl |
| Nuclease free water | Fill to 50 μl | |

[0256] Gently mix the reaction and incubate at 37° C. for 1 h. Use the concentration measured at 10 for next step. Can store at −20° C.

[0257] Cre Recombination and Purification of DNA Minicircles
[0258] 13. Perform the Cre recombination of the nicked pLASSO library in 12, as shown in the table below.

| | | FINAL |
|---|---|---|
| COMPONENT | AMOUNT | CONCENTRATION |
| Niked pLASSO library | 25 ng | 5 ng/μL |
| Cre Recombinase Buffer | 5 μl | 1X |
| (NEB) | | |
| Cre Recombinase | 1 μl | 0.01 μg/μl |
| (ABCAM) | | |
| (0.5 mg/ml) | | |
| Nuclease free water | Fill to 50 μl | |

[0259] 14. Gently mix the reaction and incubate at 37° C. for 30 min.
[0260] 15. Heat-inactivate at 70° C. for 10 min
[0261] 16. Add 1 μl of SwaI directly to the 50 μl Cre-Recombinase reactions in
[0262] 17. Gently mix the reaction by pipetting and incubate at 25° C. for 1 h
[0263] 18. Heat-inactivate at 70° C. for 10 min
[0264] 19. Cool the reaction on ice
[0265] 20. Add 2 μl ATP 10 mM and 1 μl di Exonuclease V
[0266] 21. Gently mix the reaction and incubate at 37° C. for 30 min
[0267] 22. Heat-inactivate at 70° C. for 30 min. Can Store at −20° C.

[0268] Inverted PCR
[0269] 23. Use 10 μl of the solution in 22 from as template for the following PCR reaction

| | FINAL | PER 25 μL |
|---|---|---|
| COMPONENT | CONCENTRATION | REACTION |
| DNA solution | — | 10 μL |
| 10 mM each dNTP Mix | 0.3 mM each dNTP | 1 μL |
| 10 μM TiolForward | 0.3 μM | 1.5 μL |
| Primer | | |
| 10 μM SapI Reverse | 0.3 μM | 1.5 μL |
| primer | | |
| KAPA HiFi HotStart | 0.04 units/μL | 1 μL |
| DNA Polymerase (1 | | |
| unit/μL) | | |
| 5x KAPA HiFi Fidelity | 1x | 10 μL |
| Buffer | | |
| PCR grade water | | 25 μL |

[0270] PCR Reaction Conditions

| CYCLING | | | |
|---|---|---|---|
| STEP | TEMPERATURE | | DURATION |
| 1 | Initialization | 3 min at 95° C. | 1x |
| | Denaturation | | |
| 2 | Denaturation | 20 sec at 98° C. | 25 Cycles |
| 3 | Annealing | 15 sec at 60° C. | |
| 4 | Extension | 20 sec at 72° C. | |
| 5 | Final | 1 min at 72° C. | 1x |
| | Extension | | |

[0271] 24. Add 4 μL of the PCR product in a new PCR tube and add 1.5 μL of 6× loading dye and load on a 1.2% (wt/vol) EtBr agarose gel (in 1×TBE) at 100V for 30 min
[0272] 25. Illuminate the DNA in the gel with a UV transilluminator. The expected PCR product is a strong DNA ˜550 bp band expected for the mature LASSO probes (FIG. 9). The same analysis can be also performed by using an Agilent® 2100 Bioanalyzer.
[0273] 26. Place AMPure magnetic beads and at room temperature for 30 min and vortex before use.
[0274] 27. Add 1.8× AMPure magnetic beads (83 μL of beads for the remaining 46 μL of inverted PCR reaction) to the sample and gently mix.
[0275] 28. Incubate the sample with the beads at room temperature for 5 min.
[0276] 29. Condense the beads into a pellet with the magnet for 3-5 min.
[0277] 30. Remove and discard the supernatant without disturbing the beads, leaving ˜3 μL behind. Keep the beads pelleted until the elution step; do not disturb the pellet.
[0278] 31. Pipette 200 μL of 80% (vol/vol) ethanol without disturbing the beads, and keep them pelleted.
[0279] 32. Leave the ethanol on the beads for 30 sec; then remove and discard the ethanol.
[0280] 33. Repeat the wash (for a total of two ethanol washes).
[0281] 34. Remove as much of the ethanol as possible.
[0282] 35. Air-dry the pellet for ˜1 min.
[0283] 36. Add 25 μL of nuclease-free water to the sample and then pipet 15 times to mix. Repeat the mixing to ensure better recovery.
[0284] 37. Incubate at room temperature for 5 min.
[0285] 38. Condense beads into a pellet with the magnet for 3-5 min.
[0286] 39. Collect the supernatant into a new tube
[0287] 40. Quantify the concentration of the purified PCR product

[0288] Maturation
[0289] 41. Add to the PCR tube in 61 2.5 uL of CutSmart Buffer, 2 uL of BspQI restriction enzyme
[0290] 42. Gently mix and incubate at 50° C. for 1 h
[0291] 43. Heat-inactivate for 20 min at 80° C.
[0292] 44. Add 1 uL of Lambda Exonuclease
[0293] 45. Gently mix and incubate for 30 min at 37° C.
[0294] 46. Heat-inactivate for 10 min at 80° C.
[0295] 47. Add 2 μL of USER enzyme
[0296] 48. Gently mix and incubate at 37° C. for 30 min
[0297] 49. Store the mature LASSO probe library at −20° C.
[0298] 50. Store −20° C. the mature LASSO M13 probe that will be used as positive control for capture experiments

[0299] Capture
[0300] 200-500 ng of bacterial total genomic DNA can be used for a single capture experiment. For eukaryotic genomes, at least to 1-2 μg total genomic DNA or cDNA can be used for a single capture. Consequently, the DNA template needs to be of the appropriate concentration in order to fit the 15 μL capture volume. For bacterial or small genomes ˜50 ng/μL concentration can be sufficient. For eukaryotic DNA or cDNA at least ˜250 ng/μL of template DNA can be used.
[0301] To increase capture efficiency and signal to noise ratio, genomic DNA can be fragmented. Exemplary fragment size distribution ranges from 1 kb to 10 kb. Fragmentation can be performed by using a sonication device such as a Covaris or NEBNext dsDNA Fragmentase.
[0302] 1. In the PCR thermal cycler set up the following:

| CYCLING | | | DURATION |
|---|---|---|---|
| STEP | TEMPERATURE | | (CYCLE) |
| 1 | Denaturation 1 | 5 min at 98° C. | 1x |
| 2 | Hybridization | 60 min* at 65° C. | 1x |
| 3 | Add Gap filling | 5 min at 65 65°C | 1x |
| | Mix | | |
| 4 | Capture | 30 min at 65° C. | 1x |
| 5 | Denaturation 2 | 5 min at 98° C. | 1x |
| 6 | Add Digestion | 5 min at 37° C. | 1x |
| | MIX | | |
| 7 | Digestion | 30 min at 37° C. | 1x |
| 8 | Inactivation | 20 min at 80° C. | 1x |
| 9 | End | ∞ 4° C. | 1x |

* In some examples, 60 min of hybridization is optimal for bacterial genomes

For eukaryotic or human DNA capture, overnight hybridization can be performed.
[0303] 2. Obtain LASSO M13 positive control, M13mp18 Single-stranded DNA, desired LASSO probe library(es) and DNA template.
[0304] 3. Dilute the LASSO M13 positive control for capture 1/10 and 1/100 (vol/vol) in PCR grade water
[0305] 4. Prepare positive and negative control capture below Positive control Capture Reaction Components

| | | FINAL |
|---|---|---|
| COMPONENT | AMOUNT | CONCENTRATION |
| LASSO probe M13 (1/100) | 1 μL | — |
| M13mp18 Single-stranded DNA | 0.5 μl | 0.03 ng/μL |
| 10X Ampligase DNA Ligase | 1.5 μl | 1X |
| Buffer | | |
| PCR grade water | Fill to 15 μl | — |

[0306] Negative control Capture Reaction Components

| | | FINAL |
|---|---|---|
| COMPONENT | AMOUNT | CONCENTRATION |
| LASSO probe M13 (1/100) | 1 μL | — |
| 10X Ampligase DNA Ligase | 1.5 μl | 1X |
| Buffer | | |
| PCR grade water | Fill to 15 μl | — |

[0307] 5. Set up the capture reaction(s) as follows in a PCR tube rack at room temperature
[0308] Capture n1 . . . n2

[0309] Library Capture Reaction Components

| | | FINAL |
|---|---|---|
| COMPONENT | AMOUNT | CONCENTRATION |
| Mature LASSO probe library | 10 ng | 0.7 ng/μL |
| Fragmented DNA template* | up to 2 μg** | 133 ng/μL |
| 10X Ampligase DNA Ligase | 1.5 μl | 1X |
| Buffer | | |
| PCR grade water | Fill to 15 μl | — |

[0310] 6. In a thermal cycler, the capture reactions is subjected to DNA denaturation. After denaturation the LASSO probe library hybridizes with the DNA template. After hybridization, 5 μl of the “Gap filling Mix” are added to the capture reaction. DNA target Capture is performed for 30 min at 65° C. After the capture (30 min), the temperature is lowered to 37° C. and immediately, 3 μl of Digestion Mix” are added in solution. Digestion is performed for 1 h at 37° C. followed by exonuclease inactivation at 80 for 20 min.

[0311] Post Capture PCR
[0312] 6. Prepare and run the following PCR reaction

| | FINAL CON- | PER 50 μL | |
|---|---|---|---|
| COMPONENT | CENTRATION | REACTION | |
| Capture Reaction | — | 10 μL | |
| 10 mM each dNTP Mix | 0.3 mM each | 1 μL | |
| | dNTP | | |
| 10 μM PostCaptF primer | 0.3 μM | 1.5 μL | |
| 10 μM PostCapR primer | 0.3 μM | 1.5 μL | |
| Omni Klentaq LA | units/μL | 0.5 μL | |
| 10 x Klentaq DNA | 1x | 5 μL | |
| Polymerase Buffer | | | |
| PCR grade water | | 30.5 μL | |
| CYCLING | FINAL | | PER 50 μL |
| STEP | TEMPERATURE | | REACTION |
| 1 | Initialization | 3 min at 95° C. | 1x |
| | Denaturation | | |
| 2 | Denaturation | 20 sec at 98° C. | 25 Cycles |
| 3 | Annealing | 15 sec at 60° C. | |
| 4 | Extension | 20 sec at 72° C. | |
| 5 | Final | 1 min at 72° C. | 1x |
| | Extension | | |

### Example 4

### Mature Ss DNA LASSO Probe Generation

[0313] Schematics of an exemplary embodiment of the disclosed assembly methodology is shown in FIG. 10A-10C. A single pre-LASSO probe or a pre-LASSO library in shuttled in the linearized pLASSO vector via a Gibson Assembly or by using NEBuilder DNA Assembly Master Mix (NEB) and used for transformation in E. coli. The cloned library is harvested by scraping a sufficient number of colonies from plates. Plasmids are purified by using a plasmid miniprep. The presence of the pre-LASSO probes in the plasmids was verified by digesting with restriction enzymes that cut adjacently to the Gibson assembly insertion sites (Sal1, BamH1 sites). Gel electrophoresis results illustrate successful cloning of the pre-LASSO library in pLASSO.

[0314] As shown in FIG. 10B, the native supercoiled plasmids obtained by colony miniprep, are converted in the relaxed form by nicking with endonuclease Nt.BspQ1 that uses a recognition site located in the primer annealing site of the inserted pre-LASSO probe. Cre recombination of the LoxP sites produces a DNA minicircle containing the pre-LASSO and a circular 2.7 kb DNA circle, the remaining part of pLASSO. After recombination, the 2.7 kb DNA circle, together with the unreacted plasmids and bigger DNA circles generated by inter-plasmid recombination (not shown) are eliminated by restriction followed by exonuclease digestion.

[0315] Gel electrophoresis results illustrate successful formation of the expected DNA minicircles (orange arrow) together with the 2.7 kb circular DNA remaining parts of pLASSO (green arrow), the unreacted plasmid (blue arrow). The approximately 6 kb band (yellow arrow) correspond to the recombination of two different plasmids (inter-plasmid recombination). When using the natural un-nicked pLASSO library form for Cre recombination the DNA band correspondent to DNA minicircle was absent (Lane 2) indicating that nicking mediated pLASSO plasmid relaxation helped to ensure efficient Cre-recombination. Relaxation of pLASSO plasmid induced by cutting one of the two DNA strands may allow the two recombination sites to be in closer proximity thus resulting in a more efficient formation of the Cre-recombinase synapse tetramer in which four distinct active sites are present.

### Example 5

### LASSO Probe Performance and Sensitivity Test

[0316] To assess the ability of LASSO probes in capturing a DNA target of various length, the disclosed methods were used to assemble two 550 bp mature LASSO probes containing arms designed to capture of 1 kb and 4 kb DNA target regions within ˜7.5 kb the genome of the M13mp18 phage. The sequence of the two LASSO probes were verified using Sanger sequencing. Capture experiments were performed by following the previously developed capture procedure as described by Tosi et al. (Nat Biomed Eng. 2017; 1:0092, 2017).

[0317] The post capture PCR amplicons of the expected 1 kb and 4 kb sizes were present (FIG. 11) indicating successful capture. To test the feasibility of performing a massively multiplexed capture that include thousands of LASSO probes (individually at low concentration) in the human genome, a series of capture reactions were performed in a constant human genomic DNA background where consecutive tenfold dilutions of a single 1 kb target sequence were spiked. The capture of the target sequence was also performed by testing progressive tenfold dilutions of the LASSO probe according to the table in FIG. 11. As shown in FIG. 11 the expected capture band was observed even when testing the lowest dilution of the probes with the lowest dilution of the target sequence. In this latter condition, in the 15 μl capture volume, there were only 4*10-3 ng of the single LASSO probe and the molarity of the targeted 1 kb sequence was half of the molarity of the human genomic DNA background (500 ng correspondent to ˜400 copies/μl). “off target” products were not observed when the target sequence was absent from the reaction, thus highlighting the specificity of the reaction. These results demonstrate that a very large LASSO library (composed of hundreds of thousands of probes) can fit in nanograms of total DNA library and the capture reaction is sensitive enough for massive parallel target capture in the human genome.

### Example 6

### Disclosed Versus Previous LASSO Assembly Methods

[0318] The performance of LASSO probes assembled using the disclosed DNA recombinase mediated methodology (FIG. 1A) to LASSO probes assembled using the previous Intramolecular ligation assembly methodology (FIG. 1B) in capturing a library of kilobase-sized ORFs from E. coli genomic DNA was compared. A schematic of the workflow of the LASSO assembly and capture experiment is presented in FIG. 12A-12B.

[0319] The ssDNA pre-LASSO probes were obtained from Twist Bioscience as a single oligo pool composed by 3078 pre-LASSO probes. The pre-LASSO probe had the exact same arm design of the pre-LASSO probe previously developed (Tosi et al. 2017). Of the 3,664 pre-LASSO probes those corresponding to ORF targets smaller than 400 bp were removed as a precaution to avoid potentially skewing the capture library during its subsequent PCR amplification and an additional 160 probes were also removed that targeted different capture targets lengths as negative control. Adjusting the thresholds for target length, melting temperature or the length of the ligation/extension arms determines the number of acceptable probes. Approximately 22.5% of the E. coli K12 ORFeome (900 ORFs) was thus left untargeted and used as an internal, negative control for our experiments. The E. coli LASSO probe library was assembled according with the protocol described herein.

[0320] The pre-LASSO ssDNA oligo pool was converted to dsDNA format by performing 8 PCR cycles with selector primers and cloned inserted in pLASSO by using NEBuilder HiFi DNA Assembly and transformed in electro-competent E. coli cells. Approximately ˜40,000 E. coli colonies were scraped from antibiotic agar plates representing 10× coverage of the LASSO probes contained in the E. coli library. The pLASSO library was extracted by plasmid miniprep and subjected to recombination with the Cre-recombinase enzyme. The circular LASSO precursors (DNA minicircles) were linearized by inverted PCR and underwent maturation as described above.

[0321] At the end of the inverted PCR stage, after DNA column purification, a 5p aliquot of the PCR amplicon was collected for subsequent Illumina NextSeq 150 bp paired ends sequencing in order to assess quality and uniformity of the LASSO library. At the inverted PCR stage, ligation and extension arms are already coupled with the conserved DNA Backbone in the final configuration.

[0322] The NGS results were compared to the results previously obtained by Syukri (2019) when assessing the quality of the E. coli LASSO library obtained by using two different dilution volumes for probe circularization.

[0323] The DNA Recombinase Mediated Assembly resulted in a superior quality of the LASSO library with an average percentage of “arm concordancy” (defined as the percentage of correctly paired probe arms versus total read sequences per probe type) of 40% as shown in FIG. 13A.

[0324] The uniformity of the library was assessed by counting the number of the different types of concordant LASSO probes present in the library. As shown in FIG. 13B, the majority of the probes were present within tenfold the normalized abundance of the median indicating a relatively uniform representation of single LASSO probes in the LASSO library.

[0325] We next evaluated the ability of the new LASSO probes to capture a library of kilobase-sized ORFs from E. coli genomic DNA using the same capture parameters described by Tosi et al. (2017) including the same amount of LASSO library, and E. coli DNA template. Briefly, LASSO probes were hybridized with total genomic DNA of E. coli K12, targeting the 3078 ORFs in a single reaction volume. Circles containing ORFs were PCR amplified using primers that hybridize to the conserved adapter region on each LASSO probe. Post capture PCR of circles obtained from the capture of 3078 ORFs of E. coli K12 was run in an 1.2% agarose gel and is shown in FIG. 13C. and their apparent size distribution corresponded well with that of the targeted ORFs. The rest of the post capture PCR amplicon was enzymatically shared and sequenced on an Illumina NextSeq instrument to obtain 150 nucleotide paired end reads.

[0326] For reads mapping to the E. coli genome, target enrichment factors were calculated, which were defined as the reads per kilobase of genetic element per million reads (RPKM), which were mapped to the targeted ORFs versus non-targeted ORFs. Furthermore, RPKM targeted/non-targeted ratios were analyzed for different length genetic elements by binning FIG. 13D). In this experiment, LASSO targeted ORFs were enriched in all bins (up to ˜250× for ORFs<1 kb) representing 8 times improvement in comparison to enrichment previously measured by Tosi et al. (2017).

[0327] FIG. 13E illustrates the distribution of read counts per kilobase for each targeted ORF, each untargeted ORF. The targeted ORFs were significantly enriched compared with the non-targeted ORFs and intergenic regions (by Welch two-sample t-test). The mean and the median RPKM of the targets was 2476 and 264 for the targets respectively while the mean ant the median RPKM of the Non Targets was 31. and 1.26 respectively. Fold-enrichment of targets was calculated to be between 80- and 200-fold (by the median or mean of the target RPKM, respectively, over the mean non-target RPKM). A negative correlation was observed between the normalized abundance of each target ORF and its length; ORF representation was observed to decline by 60% with each doubling of length (FIG. 13F). This bias that was previously reported (Tosi et al. 2017) may reflect target length-dependent capture efficiency, post-capture PCR bias or a combination of the two effects.

### Example 7

### Materials and Methods

[0328] This example provides the materials and methods for the results describe below in Examples 8-12.

Design of Single Pre-LASSO Probes that Target M13mp18 Bacteriophage Sequences

[0329] Pre-LASSO probe pools are short DNA oligo pools (˜160-180 bp) designed in silico and ordered from Twist Bioscience, then used for the assembly of LASSO probes. Pre-LASSO probes have five different regions: primer-annealing site, ligation arm, conserved region, extension arm, primer-annealing site. The ligation and extension arms of the pre-LASSO probes are designed to have the same 5′-3′ orientation of the sequence of the target DNA.

[0330] As a positive control, the same pre-LASSO probe targeting a 1 Kb target capture on the ssDNA of M13mp18 as the one listed by Chkaiban et al. (Curr Protoc, (11):e278, 2021) was used. It had the Tm of the extension arms ˜65° C. and the Tm of the ligation arms ˜70° C. Pre-LASSOs targeting 3 Kb sequences within the M13mp18 genome were manually designed with Tm of the extension arms ˜65° C. and 3 different Tm of the ligation arms 65° C., 70° C. and 75° C.

[0331] pre-LASSO probes targeting 4 and 5 kb sequences within the single strand M13mp18 DNA were manually designed with Tm of the extension arms ˜65° C. and the Tm of the ligation arms ˜70° C. The sequences for the above cited pre-LASSO targeting on the M13mp18 genome are listed below. The ligation and extension arms are underlined.

| Name | Sequence 5′-3′ |
|---|---|
| pre-LASSO | SEQ ID NO: 3091 |
| 1kbM13 | |
| pre-LASSO | CAGACGACGGCCAGTGTCGACTTGGAGTTTGCTTCCGGTCTGGTTCGAACACT |
| 3kbM13-65° C. | TCTTGCGGCGATGGTTCCTGGCTCTTCGATCGCTATTGGGCGCGGTAATGATT |
| | GGATCCTACGGTCATTCAGC (SEQ ID NO: 3117) |
| pre-LASSO | CAGACGACGGCCAGTGTCGACCCTGACCTGTTGGAGTTTGCTTCCGGTCTGG |
| 3kbM13-70° C. | TTCGCTTTGAAGCAACACTTCTTGCGGCGATGGTTCCTGGCTCTTCGATCGCT |
| | ATTGGGCGCGGTAATGATT GGATCCTACGGTCATTCAGC (SEQ ID NO: 3118) |
| pre-LASSO | CAGACGACGGCCAGTGTCGACGGTACTCTCTAATCCTGACCTGTTGGAGTTT |
| 3kbM13-75° C. | GCTTCCGGTCTGGTTCGCTTTAAGCTCGAATTAAAACGCAACACTTCTTGCG |
| | GCGATGGTTCCTGGCTCTTCGATCGCTATTGGGCGCGGTAATGATTGGATCC |
| | TACGGTCATTCAGC (SEQ ID NO: 3119) |
| pre-LASSO | CAGACGACGGCCAGTGTCGACTTGGAGTTTGCTTCCGGTCTGGTTCGAACAC |
| 4kbM13 | TTCTTGCGGCGATGGTTCCTGGCTCTTCGATCGGCGAATCCGTTATTGTTTCT |
| | CCCGATGTAGGATCCTACGGTCATTCAGC (SEQ ID NO: 3120) |
| pre- | CAGACGACGGCCAGTGTCGACCCTGACCTGTTGGAGTTTGCTTCCGGTCTGG |
| LASSO5kbM13 | TTCGCTTTGAAGCAACACTTCTTGCGGCGATGGTTCCTGGCTCTTCGATCCCAT |
| | TCAAAAATATTGTCTGTGCCACGTATTCTTACGCGGATCCTACGGTCATTCAGC |

Design of Different Melting Arms the Pre-LASSO Probes Pools for an E. coli Model

[0332] The effect of varying the melting temperature of LASSO probes arms on capture efficiency and specificity was achieved by designing probes that targets E. coli ORF's ranging from 999 bp-2000 bp. Specifically, five different pools were generated: a pool that had a 5° C. lower ligation arm (65-70° C.) melting temperature with respect to the extension arm (70-75° C.) (L65E70), a pool that had a 10° C. lower ligation arm (60-65° C.) melting temperature with respect to the extension arm (70-75° C.) (L60E70), a pool that had a 5° C. lower extension arm (65-70° C.) melting temperature with respect to the ligation arm (70-75° C.) (L70E65), a pool that had a 10° C. lower extension arm (60-65° C.) melting temperature with respect to the ligation arm (70-75° C.) (L70E60), and a pool that had extension and ligation arm (65-70° C.) melting temperature in the same range (L65E65). The bio-python based algorithm listed in Chkaiban et al. (Curr Protoc, (11):e278, 2021) was modified by prolonging the arms until the desired melting temperatures were reached and selected probes that would capture E. coli ORF targets ranging from 999 bp to 2000 bp. The bio-python algorithm was performed on the E. coli str. k-12 substr. mg1655 reference ORFeome found in NCBI (RefSeq: NC_000913.3). The new biopython algorithms as well as the resulting pre-LASSO list of probes can be found in the supplementary files.

### Assembly of the LASSO Probes

[0333] The assembly of the LASSO probes was performed using a 350 bp backbone according to the protocol described by Chkaiban et al. (Curr Protoc, (11):e278, 2021) for all single LASSOs and LASSO pools. In addition to the assembly with 350 bp backbone, to assess the effect of backbone length on capture efficiency, LASSO probes that target 3 Kb sequences in the M13mp18 bacteriophage were assembled using a longer 700 bp backbone linker. The 700 bp backbone linker was substituted to the 350 bp backbone in the support protocol 1 in the pLASSO plasmid generation listed in Chkaiban et al. (Curr Protoc, (11):e278, 2021) ahead of the LASSO probe assembly protocol. The backbone linker oligonucleotides are listed below.

| Name | Sequence 5′-3′ |
|---|---|
| EcoR1 | TCGAGGAATTCAGAGAAGTCATCAAAGAGTTTAAAGA |
| Backbone- | GTTTATGAGATTTAAGGTCAAGACAACGAGACACGAG |
| 350 bp | TTCGAGATTGAGGGAGAGAAGGCCCCTCAGCGGCCTT |
| (SEQ ID | ATAACTATAACGGTCCTAAGGTAGCGAACGAACAAAC |
| NO: 3122) | CGCTAAGCTCAAGGTCACAAAAGGTCGACGAGGACCC |
| | GGATCCCTCCCCTTCTCCTGGTACGGAAGCAAAGCCT |
| | ATGTTAAACACTGACTATCTGAAGCTCTCCTTCCCTG |
| | AAGGCTTGAGAGATTCATGAACTTCGAGGAAGGACGG |
| | AGAGTTTATTTATAAGGAACCAACTTCCCCTCCGATG |
| | GCCCTGTCATGAATTCT |
| EcoR1 | TCGAGGAATTCAGAGAAGTCATCAAAGAGTTTAGTGA |
| Backbone- | GGCTCGTCCATCTGACGGCTGCTCATTGGTGTGGCTC |
| 700 bp | TCGACTGCTAGTGCTTACGGCCGTAGCCGGTCGATCG |
| (SEQ ID | TACGTGCATGCCCTCCCGGTAGTCTCTCGTCGTGCAA |
| NO: 3123) | GCTGCCTCCAGCTTACCAGATTCGATAAAGAGTTTAT |
| | GAGATTTAAGGTCAAGACAACGAGACACGAGTTCGAG |
| | ATTGAGGGAGAGAAGGCCCCTCAGCGGCCTTATAACT |
| | ATAACGGTCCTAAGGTAGCGAACGAACAAACCGCTAA |
| | GCTCAAGGTCACAAAAGGTCGACGAGGACCCGGATCC |
| | CTCCCCTTCTCCTGGTACGGAAGCAAAGCCTATGTTA |
| | AACACTGACTATCTGAAGCTCTCCTTCCCTGAAGGCT |
| | TGAGAGATTCATGAACTTCGAGGAAGGACGGAGAGTT |
| | TATTTATAATGCCATGCGCAATGCTCGCAAATTGGCC |
| | GGTACCGTACTTAACCCGAGTTCAAGCTGAGCCGTTT |
| | CGTTAGCGTGCCGCGCAGCAGCTCGCTCAACGACCCT |
| | CGCTCGTGCGCCTGAGTGCTCCATCTTAGCGTGTACT |
| | GGCTAATAAAACTGGTGCGCCGTAAGGTCCGTGCGAC |
| | TGACTGCCTGTCAAGCACAACTGCTAGCTACTGGAAC |
| | CAACTTCCCCTCCGATGGCCCTGTCATGAATTCT |

### DNA Target Capture

[0334] To optimize capture efficiency, two different DNA polymerases (Omni Klentaq LA and Kapa HiFi) were tested in gap filling Mix of the capture step (see table below) with LASSO probes that target 1 Kb and 3 Kb within M13mp18 bacteriphage genome. 3 tenfold increases concentrations in Ampligase DNA Ligase were tested in the components used in the gap filling Mix of the capture step with LASSO probes that target 1 Kb on single stranded and double stranded DNA of the M13mp18 bacteriophage.

Composition of Gap Filling Mix with 0.5 U DNA Ligase in the Reaction Volume (20 μl) and Omni Klentaq LA

| COMPONENT | Amount PER 100 μl Stock |
|---|---|
| Omni Kelntaq gap filling mix | 0.5 U ligase |
| PCR grade Water | 75.1 μl |
| 10X Ampligase DNA ligase Buffer | 10 μl |
| 10 mM dNTPs | 0.4 μl |
| Ampligase DNA Ligase (100 U/μl) | 0.1 μl |
| Omni Klentaq LA | 0.4 μl |
| NADH | 4 μl |
| Glycerol | 10 μl |

Composition of Gap Filling Mixes with DNA Ligase at Various Amount in the Reaction Volume (20 μl) and Kapa HiFi Polymerase

| COMPONENT | Amount PER 100 μl Stock | | |
|---|---|---|---|
| Kapa HiFi gap | 0.5 U ligase | 5 U ligase | 50 U ligase |
| filling mix | | | |
| PCR grade Water | 74.7 μl | 73.7 μl | 64.7 μl |
| 10X Ampligase | 10 μl | 10 μl | 10 μl |
| DNA ligase Buffer | | | |
| 10 mM dNTPs | 0.4 μl | 0.4 μl | 0.4 μl |
| Ampligase DNA | 0.1 μl | l μl | 10 μl |
| Ligase (100 U/μl) | | | |
| Kapa HiFi | 0.8 μl | 0.8 μl | 0.8 μl |
| NADH | 4 μl | 4 μl | 4 μl |
| Glycerol | 10 μl | 10 μl | 10 μl |

[0335] The Kapa HiFi based gap filling mix with 5 U ligase in the final reaction volume was used for most of the captures, namely: LASSOs targeting 3 Kb sequences within the single strand M13mp18 DNA 3 different Tm of the ligation arms 65° C., 70° C. and 75° C., with 350 bp and 700 bp backbone linker, LASSOs targeting 4 and 5 Kb sequences within the single strand M13mp18 DNA, and LASSO probes pools that target E. coli DNA and have different melting temperature arms.

[0336] The capture was completed with a digestion step after which we performed a post-capture PCR according to the protocol listed in Chkaiban et al. (Curr Protoc, (11):e278, 2021). The primers used in the post capture PCR reaction were AttB1 CaptF (SEQ ID NO: 3110) and AttB2 CaptR (SEQ ID NO: 3111). The total amount of post-capture product was used as an estimate of the efficiency of the capture reaction.

### Sanger Sequencing:

[0337] The band from the electrophoresis gel showing a 5 Kb captured target band size from the ssDNA of M13mp18 was excited and purified using Monarch DNA Gel Extraction Kit (#T1020S). Sanger sequencing was performed on the eluate to confirm the identity of the band.

### DNA Preparation and Barcoding of Pools for Oxford Nanopore Sequencing

[0338] The ligation kit SQK-LSK 109 was used with the PCR barcoding expansion 1-12 EXP-PBC0001 supplied by Oxford Nanopore and followed the respective protocols for DNA sample preparation for sequencing. An R 9.4.1 flow cell was primed with the component supplied in in the flow cell priming kit (EXP-FLP002) and loaded 50 fmol after mixing it with loading beads and sequencing buffer supplied with the kits. The sequencing was run in the MinION Mk1C and set it for real-time data acquisition and basecalling.

### Sequencing Data Analysis

[0339] The resulting reads found in fastq files were aligned and subdivided according to their barcode directly in the MinKNOW app built-in the MinION Mk1C. Each pool was mapped against the ORFeome reference file for Escherichia coli str. k-12 substr. mg1655 found in NCBI (RefSeq: NC_000913.3) uploaded locally as a fasta file. The filtering and the statistical analyses and resulting bean plot graph were performed on R software.

### Cloning the Captured Amplicons Pools in the Gateway System

[0340] The post capture PCR product pools were bead purified and mixed with the Gateway ‘donor vectors’ (pDONR221) and the BP Clonase enzyme mix (Invitrogen). The BP reaction was purified and used for electroporation in NEB® 10-beta Electro-competent E. coli (c3020K) to generate cloned libraries. Plasmids were extracted and digested them with EcoRV restriction enzymes to linearize them and proceeded with end repair and DNA preparation for sequencing with the same ligation and barcoding kit used for the amplicon pools mentioned above (SQK-LSK109 with EXP-PBC001).

### Example 8

### Effect of DNA Polymerase Type and Ligase Concentration on Capture Efficiency

[0341] DNA polymerase extends the 3′ end starting from the extension arm and copies the target sequence until the ligation arm, where it dissociates allowing the ligation of the 5′-end with the phosphate of the ligation arm. In some examples, a polymerase with low strand displacement is used so it can dissociate when it reaches the ligation arm and give the opportunity for the ligase to close the LASSO. Exemplary polymerases with low strand displacement include the stoffel fragment of the AmpliTaq DNA polymerase (Applied Biosystems), Omni Klentaq LA (DNA polymerase technologies), and Kapa HiFi.

[0342] Two different polymerases (Omni Klentaq LA and Kapa HiFi) were analyzed when capturing 1 Kb and 3 Kb target within ds DNA of the M13mp18 phage genome, while all the other components of the gap filling mixes remained the same. Although the two polymerases did not have a significantly different effect on the 1 Kb target capture—estimated in ng of PCR post capture product—Kapa HiFi consistently generated more postcapture PCR products for the longer 3 Kb target capture (FIG. 14A). Thus, Kapa HiFi was used for all subsequent experiments.

[0343] The concentration of DNA ligase in the gap filling mix (by 10 fold increases) was determined. Capture on single strand DNA templates produced higher capture efficiency then when starting with double stranded DNA (FIG. 14B). In addition, among the three conditions tested, 5 unit of DNA ligase/20 μl reaction volume was an optimal concentration in terms of efficiency (FIG. 14B). Thus, increasing the concentration of DNA ligase by 10-fold improved target capture efficiency (from 0.5 to 5 U in 20 ul of the reaction volume).

### Example 9

### Effect of DNA Backbone Length and Tm Ligation Arms on Capture Efficiency

[0344] The effect of backbone length and ligation arm length on capture efficiency was examined by assembling six LASSO probes having three progressively longer ligation arms for each backbone 350 and 700 bp that targeted the same 3 Kb region on ssDNA of M13mp18 phage. LASSOs with the shorter 350 bp backbone performed better than with longer backbone 700 bp, especially for 1 Kb targets (FIG. 15B lane 1 and 6). Thus the 350 bp backbone for LASSO probe assembly was used for subsequent experiments. FIGS. 15A and 15B show the effect of Tm of the ligation arm on capture efficiency. The highest capture efficiency was obtained when using a ligation arm of 70° C.

### Example 10

### 4 and 5 Kb Target Capture

[0345] To test the capability of the LASSO technology in capturing long DNA targets, pre-LASSO probes were designed that target 4 and 5 Kb sequences on single strand M13mp18 genomic DNA with Tm of the extension arms ˜65° C. and the Tm of the ligation arms ˜70° C. When running the post capture PCR product on an electrophoresis gel bands were detected at around 4 kb and 5 kb, indicating successful capture of the targeted sequences (FIG. 15C). Furthermore, the identity of the 5 kb band was corroborated by Sanger sequencing it after excising and purifying it from the gel. The two chromatograms, obtained by sequencing with forward and reverse post capture PCR primers, showed close to the beginnings the presence of a sequence that mapped with ligation (in green) and extension (in red) arms as per the design of the probe (FIG. 15D) followed by the rest of the targeted sequence indicating that the target was captured in its full length.

### Example 11

### Capture Efficiency of LASSO Pools of Different Melting Temperatures Arms

[0346] One challenge of the LASSO capture is designing a pool of probes that can capture their targets with similar efficiencies so that in the final captured library all the targets are represented with the similar frequency.

[0347] To establish more accurate and improved parameters for the design of pre LASSOs, LASSO pools of varied melting temperature (T_{M}) arms were tested when capturing targets within the E. coli ORFeome from 999 bp-2000 bp. FIG. 16A shows the distribution of the potential targets of the designed LASSOs by length into bins of 50 bp incrementally. Most of the LASSOs target sequences ranged from 1000 to 1400 bp. FIG. 16B lists the T_{M} arm ranges and the number of LASSO the algorithm generated for each pool (as described in Example 7). The algorithm produced 128 to 807 targets/LASSO out of the 4140 ORF for each pool. Running the post capture product on a gel of the various captured pools showed a smear for each pool in the expected size range (FIG. 16C). The smear was more pronounced in the range of 1000 to 1400 bp, in accordance to the size distribution initially produced by the algorithm. The amplicons were sequenced with MinION Mk1C or shuttled into pDNOR vector via Gateway system. The gateway reaction was used for cloning in E. coli and antibiotic resistant colonies were selected from agar plates and the extracted plasmid were sequenced.

[0348] Using R software, the depth of coverage for each target was calculated and plotted it for both the pools of captured amplicons (FIG. 17A) and the pools of the amplicons transformed into pDNOR 221 plasmids (FIG. 17B). With respect to the pools of amplicon targets, the highest coverage on average was obtained for the targeted ORFs captured with the L70E65 pool that had the melting temperature of the extension arm in the range of 65-70° C. and ligation arm in 70-75° C., whereas the most homogeneous distribution was observed in the L65E65 because it yielded the lowest mean log deviation (MLD) of 0.77 in comparison to 2.90, 3.73, 2.06, 3.24 of the L65E70, L60E70, L70E65, L70E60 pools respectively. The mean log deviation (MLD) was used as an indicator dis-proportionality in the coverage of targeted of ORF. When the coverage of non-targeted ORFs was filtered and computed for each pool, the median coverage was 0.91, 1.83, 63.99, 1.94 and 0.93 for L65E70, L60E70, L70E65, L70E60 and L65E65 respectively (FIG. 17C). This shows the low specificity for probes (L70E65 pool) having a ligation arm Tm ˜5° C. higher than the extension arm (65-70° C.), while the highest specificity was for the pool (L65E65) that had extension and ligation arm melting temperature in the same range (65-70° C.), recorded as lowest coverage for untargeted sequences. Thus, the best capture uniformity, in terms of probes representation, highest target enrichment and specificity and almost complete capture of all targets was obtained with probes designed with equal melting arm temperature in the 65-70° C. range.

[0349] In addition, at a cutoff of three times the median non-target coverage, around 49.81%, 18.47%, 60.68%, 46.09%, 96.26% of the targeted ORFs were successfully captured for L65E70, L60E70, L70E65, L70E60 and L65E65, respectively, indicating the higher capture efficiency of LASSOs that had similar melting temperature arms at (65-70° C.). In addition, a 57.41, 0.92, 7.60, 4.26 and 315.69-fold enrichment of coverage for captured target versus coverage for captured non targeted ORF's was observed for each of L65E70, L60E70, L70E65, L70E60 and L65E65 pools, respectively.

[0350] To further investigate the effect of the difference between melting arm temperature within the pool that had similar extension and ligation arm (65-70° C.) we plotted the ΔTm (Tm extension arm−Tm ligation arm) against data point density and observed a higher density of capture targets when was extension Tm was slightly higher 2.5° C. to equal to the ligation Tm (FIG. 17D). With respect to libraries of the transformed amplicons into pDNOR 221 plasmids, the median coverage for targeted ORF was similar to all the pools (˜199) (FIG. 17B).

[0351] In view of the many possible embodiments to which the principles of the disclosure may be applied, it should be recognized that the illustrated embodiments are only examples of the invention and should not be taken as limiting the scope of the invention. Rather, the scope of the invention is defined by the following claims. We therefore claim as our invention all that comes within the scope and spirit of these claims.

We claim:

1. A single stranded (ss) DNA Long Adapter Single Stranded Oligonucleotide (LASSO) probe, comprising, from 5′ to 3′:
a ligation arm sequence complementary to a 5′ region of a target sequence;
a backbone sequence that is not complementary to the target sequence, and comprises a recombination site; and
an extension arm sequence complementary to a 3′ region of the target sequence,
wherein the ligation arm sequence and extension arm sequence are complementary to 5′ and 3′ regions of a single target sequence, respectively, and the complementary regions are at least 200 nucleotides (nts) apart on the target sequence.

2. The ssDNA LASSO probe of claim 1, wherein the target sequence is a coding or noncoding DNA sequence.

3. The ssDNA LASSO probe of claim 1, wherein
the ligation arm sequence is about 20 to 50 nts;
the backbone sequence is about 200 to 800 nts;
the extension arm sequence is about 20 to 40 nts; or
combinations thereof.

4. The ssDNA LASSO probe of claim 1, wherein the ssDNA LASSO is about 400 to 800 nts.

5. The ssDNA LASSO probe of claim 1, wherein the target sequence is a single contiguous target sequence.

6. A composition comprising a plurality of the ssDNA LASSO probes of claim 1, wherein the plurality includes oligonucleotides with sequences complementary to at least two different target sequences.

7. A composition comprising:
one or more ssDNA LASSO probes of claim 1, and
a pharmaceutically acceptable carrier.

8. A kit comprising:
one or more ssDNA LASSO probes of claim 1, and
one or more endonucleases, one or more exonucleases, one or more polymerases, one or more ligases, one or more recombinases; one or more reagents for PCR, or combinations thereof.

9. A method of generating the ssDNA LASSO probe of claim 1, comprising:
providing a double stranded pre-LASSO probe comprising from 5′ to 3′(i) a first primer annealing site sequence, (ii) the extension arm sequence, (iii) an inverted PCR primer annealing site comprising a restriction site that allows for asymmetric cutting, (iv) the ligation arm sequence, and (v) a second primer annealing site sequence;
contacting the pre-LASSO probe with a double stranded linear pLASSO vector comprising from 5′ to 3′ (i) the second primer annealing site sequence, (ii) a first backbone region that does not substantially hybridize to the target sequence, (iii) a first recombination site, (iv) a selectable marker, (v) an origin of replication, (vi) a second recombination site, (vii) a second backbone region that does not substantially hybridize to the target sequence, and (viii) the first primer annealing site sequence, wherein the double stranded linear pLASSO vector further includes a nicking endonuclease recognition site, a restriction site not in the backbone, and optionally a first and second restriction endonuclease site, in the presence of a 5′ exonuclease, a polymerase, and a DNA ligase to allow annealing, gap filling and ligation of the first and second primer annealing sites of the pre-LASSO probe to the first and second primer annealing sites of the linear pLASSO vector, thereby generating a circular pLASSO vector containing the pre-LASSO probe;
introducing the circular pLASSO vector into host cells, thereby generating transformed host cells comprising the circular pLASSO vector;
growing the transformed host cells in the presence of a growth media comprising reagents that do not permit growth of the host cells in the absence of the selectable marker;
extracting the circular pLASSO vector from the transformed host cells;
contacting the extracted circular pLASSO vector with a nicking endonuclease specific for the nicking endonuclease recognition site, under conditions that cleave one nucleic acid strand of the extracted circular pLASSO vector, thereby producing a relaxed circular pLASSO vector;
contacting the relaxed circular pLASSO vector with a recombinase specific for the first and second recombination site, under conditions that recombination of the relaxed circular pLASSO vector occurs, thereby generating (i) a plasmid comprising a recombination site, the selection marker, and the origin of replication and (ii) a minicircle comprising the double stranded pre-LASSO probe, the first and second backboned, and a recombination site;
digesting the plasmid with a restriction enzyme and exonuclease V;
using inverted PCR of the minicircle with a first primer and a second primer that hybridize to the inverted PCR primer annealing site, wherein the first primer includes a Type IIS restriction enzyme site and wherein the second primer comprises a 3′-uracil and the first three 5′-end nt are modified nucleotides resistant to exonuclease treatment, thereby generating a linear double stranded minicircle with a 5′ end and 3′ end, wherein the 5′ end of the linear double stranded minicircle is the first primer annealing site at the 3′ end of the linear double stranded minicircle is the second primer annealing site; and
removing all or part of the first and second primer annealing sites from the 5′ and 3′ end of the linear double stranded minicircle by restriction digestion and/or glycosylase digestion; to produce a digested linear double stranded minicircle; and
removing one of the two strands of the digested linear double stranded minicircle, thereby producing the ssDNA LASSO probe.

10. The method of claim 9, wherein removing all or part of the first and second primer annealing sites from the 5′ and 3′ end of the linear double stranded minicircle comprises:
digesting the linear double stranded minicircle with a restriction enzyme that recognizes an asymmetric DNA sequence and cleaves outside its recognition site located in the “inverted PCR primer annealing site” and cleaves the 3′-5′ (bottom strand) a DNA strand exactly at the 5′ end of the extension arm, to produce a digested linear double stranded minicircle′
contacting the digested linear double stranded minicircle with an exonuclease to digest a strand of the digested linear double stranded minicircle that is not protected by the 5′ phosphorothioate bonds, thereby generating a single stranded digested linear double stranded minicircle; and
contacting the single stranded digested linear double stranded minicircle with a USER enzyme, thereby removing all of the first and second primer annealing sites from the 5′ and 3′ end of the linear double stranded minicircle, to generate a mature single strand DNA Lasso probe.

11. The method of claim 9, wherein removing one of the two strands of the digested linear double stranded minicircle comprises incubation with lambda exonuclease.

12. The method of claim 9, wherein providing a double stranded pre-LASSO probe comprises providing a plurality of double stranded pre-LASSO probes, and the method creates a library of ssDNA LASSOs that can target a plurality of sequences.

13. A method of detecting a target sequence, comprising:
contacting a sample comprising the target sequence with the ssDNA LASSO of claim 1, wherein the ligation arm sequence and the extension arm sequence are complimentary to a 5′ region of the target sequence and to a 3′ region of the target sequence, respectively;
hybridizing the ligation arm sequence and extension arm sequence to the target sequence;
gap filling to copy the target sequence between the ligation arm sequence and extension arm sequence using a polymerase;
ligating the resulting molecule, thereby generating a circular single stranded DNA fragment comprising the target sequence;
isolating the circular single-stranded DNA fragment comprising the target sequence; and
amplifying the circular single stranded DNA fragment comprising the target sequences, thereby detecting the target sequences.

14. The method of claim 13, wherein the method detects a plurality of different target sequences, and the method comprises contacting the sample comprising the target sequences with a plurality of ssDNA LASSOs, wherein the plurality of ssDNA LASSOs comprise sequences complementary to the different target sequences.

15. The method of claim 13, wherein the hybridizing and the gap filling are performed at 55-75° C.

16. The method of claim 14, wherein the plurality of different target sequences comprise at least 10,000 different target sequences.

17. The method of claim 14, wherein the sample comprises eukaryotic or prokaryotic genomic DNA (gDNA).

18. The method of claim 17, wherein the gDNA is human gDNA.

19. The method of claim 14, wherein the sample comprises cDNA.

20. A library of target sequences generated by the method of claim 9.

21. A kit, comprising:
a double stranded pre-LASSO probe, comprising from 5′ to 3′(i) a first primer annealing site sequence, (ii) the extension arm sequence, (iii) an inverted PCR primer annealing site comprising a restriction site that allows for asymmetric cutting, (iv) the ligation arm sequence, and (v) a second primer annealing site sequence;
a double stranded linear pLASSO vector comprising from 5′ to 3′ (i) the second primer annealing site sequence (ii) a first backbone region that does not substantially hybridize to the target sequence, (iii) a first recombination site, (iv) a selectable marker, (v) an origin of replication, (vi) a second recombination site, (vii) a second backbone region that does not substantially hybridize to the target sequence, and (viii) the first primer annealing site sequence, wherein the double stranded linear pLASSO vector further includes a nicking endonuclease recognition site, a restriction site not in the backbone, an optional a first restriction endonuclease site and an optional second restriction endonuclease site; and
optionally one or more endonucleases, one or more exonucleases, one or more recombinases; one or more growth media; one or more reagents for inverted PCR, or combinations thereof.

The application's sequence listing, which the Patent Office published only in electronic form, follows.

SEQUENCE LISTING (3126 sequences)

SEQ ID NO: 1 - DNA, 158 bp, synthetic construct
  misc_feature 1..158: note = Synthetic nucleic acid
  source 1..158: mol_type = other DNA
cagacgacggccagtgtcgacatgaaaaagttacgcgtagccgcctgcatgctaatgctggcgaacacttcttgcggcgatggttcctggctcttcgatcccggcgcggctgaagatctgctgattgtcagaccgcggggatcctacggtcattcagc

SEQ ID NO: 2 - DNA, 158 bp, synthetic construct
  misc_feature 1..158: note = Synthetic nucleic acid
  source 1..158: mol_type = other DNA
cagacgacggccagtgtcgacatggcagataatccagacccttcatcgctcctgccggacgtaacacttcttgcggcgatggttcctggctcttcgatcggattttcaagttcgccacaagggctggattggggaactggatcctacggtcattcagc

SEQ ID NO: 3 - DNA, 158 bp, synthetic construct
  misc_feature 1..158: note = Synthetic nucleic acid
  source 1..158: mol_type = other DNA
cagacgacggccagtgtcgacatgaacaggaccagtccctattattgtcgccgctcagtactttccttattaacacttcttgcggcgatggttcctggctcttcgatcgcggtagctggtgtgaactggtcgttcgagggatcctacggtcattcagc

SEQ ID NO: 4 - DNA, 158 bp, synthetic construct
  misc_feature 1..158: note = Synthetic nucleic acid
  source 1..158: mol_type = other DNA
cagacgacggccagtgtcgacatgattgaacgcggtaaatttcgctcactgacgctgattaactggaaaacacttcttgcggcgatggttcctggctcttcgatcggaactgacgaagcgccttctcaggcgagtataggatcctacggtcattcagc

SEQ ID NO: 5 - DNA, 158 bp, synthetic construct
  misc_feature 1..158: note = Synthetic nucleic acid
  source 1..158: mol_type = other DNA
cagacgacggccagtgtcgacatgttgtacgataaatcccttgagagggataactgtggtttcggcctgatcgaacacttcttgcggcgatggttcctggctcttcgatcagctgagttgcgcgtgcaggcgcagggatcctacggtcattcagccgc

SEQ ID NO: 6 - DNA, 158 bp, synthetic construct
  misc_feature 1..158: note = Synthetic nucleic acid
  source 1..158: mol_type = other DNA
cagacgacggccagtgtcgacatgagcggaaaaccagcggcgcgtcagggagatataacacttcttgcggcgatggttcctggctcttcgatcagtgtcccgggattgagttcagtatgcataccgtatcatgatataggatcctacggtcattcagc

SEQ ID NO: 7 - DNA, 158 bp, synthetic construct
  misc_feature 1..158: note = Synthetic nucleic acid
  source 1..158: mol_type = other DNA
cagacgacggccagtgtcgacatgagcggaaaaccggcggcgcgtcagggtgaaacacttcttgcggcgatggttcctggctcttcgatcaacagaaaaggattacctaatgtctgcagagttcatggtaatatgaaaggatcctacggtcattcagc

SEQ ID NO: 8 - DNA, 158 bp, synthetic construct
  misc_feature 1..158: note = Synthetic nucleic acid
  source 1..158: mol_type = other DNA
cagacgacggccagtgtcgacgtgaaagatttattaaagtttctgaaagcgcagactaaaaccgaagagtttgatgcaacacttcttgcggcgatggttcctggctcttcgatcctgggcggttctgataacgagcggggatcctacggtcattcagc

SEQ ID NO: 9 - DNA, 158 bp, synthetic construct
  misc_feature 1..158: note = Synthetic nucleic acid
  source 1..158: mol_type = other DNA
cagacgacggccagtgtcgacatgagcggaaaaccggcggcgcgtcagggcgaaacacttcttgcggcgatggttcctggctcttcgatcaataacattggacgttttattagatttgtattcaccggagtgatgccaggatcctacggtcattcagc

SEQ ID NO: 10 - DNA, 158 bp, synthetic construct
  misc_feature 1..158: note = Synthetic nucleic acid
  source 1..158: mol_type = other DNA
cagacgacggccagtgtcgacatgagcggaaaaccggcagcgcgtcagggcgaaacacttcttgcggcgatggttcctggctcttcgatcgcctggaattgtcgtcactccagacagtcaaacgataaaaaaagagccggatcctacggtcattcagc

SEQ ID NO: 11 - DNA, 158 bp, synthetic construct
  misc_feature 1..158: note = Synthetic nucleic acid
  source 1..158: mol_type = other DNA
cagacgacggccagtgtcgacttgagccaggaatacattgaagacaaagaagtcacattgacaaagttaagtagcgaacacttcttgcggcgatggttcctggctcttcgatcgctggccccaccgccgtttgacggatcctacggtcattcagccgc

SEQ ID NO: 12 - DNA, 158 bp, synthetic construct
  misc_feature 1..158: note = Synthetic nucleic acid
  source 1..158: mol_type = other DNA
cagacgacggccagtgtcgacatgggaaccaccaccatgggggttaagctggacgacgcaacacttcttgcggcgatggttcctggctcttcgatcgctgccgctggcggtaacgccagcttaatgactataggtgcgggatcctacggtcattcagc

SEQ ID NO: 13 - DNA, 158 bp, synthetic construct
  misc_feature 1..158: note = Synthetic nucleic acid
  source 1..158: mol_type = other DNA
cagacgacggccagtgtcgacatgacagaacaacaaaaattgacctttacggccttgcagcagcaacacttcttgcggcgatggttcctggctcttcgatcgcgtattttgcaggcgatggagcagattagcggtggcggatcctacggtcattcagc

SEQ ID NO: 14 - DNA, 158 bp, synthetic construct
  misc_feature 1..158: note = Synthetic nucleic acid
  source 1..158: mol_type = other DNA
cagacgacggccagtgtcgacatgatggaaattctgcgtggttcgcctgcactgtcggcattccaacacttcttgcggcgatggttcctggctcttcgatcgcgcattttccgcaatgcgcgtaagcagttggggggaggatcctacggtcattcagc

SEQ ID NO: 15 - DNA, 158 bp, synthetic construct
  misc_feature 1..158: note = Synthetic nucleic acid
  source 1..158: mol_type = other DNA
cagacgacggccagtgtcgacatgagccagcatttacctttggtcgccgcacagcaacacttcttgcggcgatggttcctggctcttcgatcgtttgaaaaaattgggccgattattcgcgcaacgctaaacaggcagggatcctacggtcattcagc

SEQ ID NO: 16 - DNA, 158 bp, synthetic construct
  misc_feature 1..158: note = Synthetic nucleic acid
  source 1..158: mol_type = other DNA
cagacgacggccagtgtcgacgtgaggcgattgccggggattttactgcttactggagccgaacacttcttgcggcgatggttcctggctcttcgatccgaagtgttgcgccaaccgcgtaaagaaaaagcgcaaagcggatcctacggtcattcagc

SEQ ID NO: 17 - DNA, 158 bp, synthetic construct
  misc_feature 1..158: note = Synthetic nucleic acid
  source 1..158: mol_type = other DNA
cagacgacggccagtgtcgacatgagtttatggaaaaaaatcagcctcggcgtggttatcgttatcttaaacacttcttgcggcgatggttcctggctcttcgatccactggatttgctctatcagttcgagttttacggatcctacggtcattcagc

SEQ ID NO: 18 - DNA, 158 bp, synthetic construct
  misc_feature 1..158: note = Synthetic nucleic acid
  source 1..158: mol_type = other DNA
cagacgacggccagtgtcgacatgcggattatctttctacgcaaggagtatttatctttactcccgtcaataacacttcttgcggcgatggttcctggctcttcgatcgggtttttgtcgatgacggtgaaatggacgggatcctacggtcattcagc

SEQ ID NO: 19 - DNA, 158 bp, synthetic construct
  misc_feature 1..158: note = Synthetic nucleic acid
  source 1..158: mol_type = other DNA
cagacgacggccagtgtcgacatgagtaaattcctggaccggtttcgctacttcaaacagaaggaacacttcttgcggcgatggttcctggctcttcgatccgaaggcaatgaccaggtacaggagagcgtaaaagcaggatcctacggtcattcagc

SEQ ID NO: 20 - DNA, 158 bp, synthetic construct
  misc_feature 1..158: note = Synthetic nucleic acid
  source 1..158: mol_type = other DNA
cagacgacggccagtgtcgacatgagtaaacttttggatcgctttcgctacttcaaacaaaagggcaacacttcttgcggcgatggttcctggctcttcgatcaaggtcgcgatcaggtacaggaggcgaaaaaaagaggatcctacggtcattcagc

SEQ ID NO: 21 - DNA, 158 bp, synthetic construct
  misc_feature 1..158: note = Synthetic nucleic acid
  source 1..158: mol_type = other DNA
cagacgacggccagtgtcgacgtgagcagcaaagtggaacaactgcgtgcgcagttaaatgaacgtattaacacttcttgcggcgatggttcctggctcttcgatctggcaccgaatctggggtatgacgcggaccccggatcctacggtcattcagc

SEQ ID NO: 22 - DNA, 158 bp, synthetic construct
  misc_feature 1..158: note = Synthetic nucleic acid
  source 1..158: mol_type = other DNA
cagacgacggccagtgtcgacatggacaaggaattaccgtggctggcggataacgccaacacttcttgcggcgatggttcctggctcttcgatcatttgagtgaggcgttaagcgcacctgacgtcattttccattatggatcctacggtcattcagc

SEQ ID NO: 23 - DNA, 158 bp, synthetic construct
  misc_feature 1..158: note = Synthetic nucleic acid
  source 1..158: mol_type = other DNA
cagacgacggccagtgtcgacatgagtgatgtcgccgagacactagatcctttgcgcttgccaacacttcttgcggcgatggttcctggctcttcgatcgatgagatgtttgccggtatgaccctggaggaggcggccggatcctacggtcattcagc

SEQ ID NO: 24 - DNA, 158 bp, synthetic construct
  misc_feature 1..158: note = Synthetic nucleic acid
  source 1..158: mol_type = other DNA
cagacgacggccagtgtcgacatgattactattgacggtaatggcgcggttgcttcggtcgaacacttcttgcggcgatggttcctggctcttcgatcacaaatggccggaaaagcggaaaaaagcaacaccgataggggatcctacggtcattcagc

SEQ ID NO: 25 - DNA, 158 bp, synthetic construct
  misc_feature 1..158: note = Synthetic nucleic acid
  source 1..158: mol_type = other DNA
cagacgacggccagtgtcgacatgatgaataaatccaattttgaattcctgaagggcgtcaacgacttcaaacacttcttgcggcgatggttcctggctcttcgatccagcgattatatctgggacgagctggcccacggatcctacggtcattcagc

SEQ ID NO: 26 - DNA, 158 bp, synthetic construct
  misc_feature 1..158: note = Synthetic nucleic acid
  source 1..158: mol_type = other DNA
cagacgacggccagtgtcgacatgtctgaaccacgtttcgtacacctgcgggtgcacagaacacttcttgcggcgatggttcctggctcttcgatcggcctcattggttcggagcaggtggaactggagtttgacccaggatcctacggtcattcagc

SEQ ID NO: 27 - DNA, 158 bp, synthetic construct
  misc_feature 1..158: note = Synthetic nucleic acid
  source 1..158: mol_type = other DNA
cagacgacggccagtgtcgacatgcgcaaattcacactaaacatattcacgctttccctcggtctggcaacacttcttgcggcgatggttcctggctcttcgatcccgcagccgctgataccttacgccgactggcccggatcctacggtcattcagc

SEQ ID NO: 28 - DNA, 158 bp, synthetic construct
  misc_feature 1..158: note = Synthetic nucleic acid
  source 1..158: mol_type = other DNA
cagacgacggccagtgtcgacatgcctgaacaatatcgttatacgctgcccgtcaaagcggaacacttcttgcggcgatggttcctggctcttcgatcccagtttatgcgtgaactggaagagaacgcgatcgctggatcctacggtcattcagccgc

SEQ ID NO: 29 - DNA, 158 bp, synthetic construct
  misc_feature 1..158: note = Synthetic nucleic acid
  source 1..158: mol_type = other DNA
cagacgacggccagtgtcgacatgttaagggtctaccattccaatcgtctggacgtgctaacacttcttgcggcgatggttcctggctcttcgatccaacgtttcctgttaccgctgtttcgctttaatcagtcaataggatcctacggtcattcagc

SEQ ID NO: 30 - DNA, 158 bp, synthetic construct
  misc_feature 1..158: note = Synthetic nucleic acid
  source 1..158: mol_type = other DNA
cagacgacggccagtgtcgacatgactatgttccagtattacaaacgatcacggcattttgttttttcagcatttattaacacttcttgcggcgatggttcctggctcttcgatcacccgacgccagcggtagggacgggatcctacggtcattcagc

SEQ ID NO: 31 - DNA, 158 bp, synthetic construct
  misc_feature 1..158: note = Synthetic nucleic acid
  source 1..158: mol_type = other DNA
cagacgacggccagtgtcgacatggcagtaaagatttcaggtgtactgaaagacggcacaaacacttcttgcggcgatggttcctggctcttcgatctcaaaaacatcgcatttaactatattgtgaggcttgcattgggatcctacggtcattcagc

SEQ ID NO: 32 - DNA, 158 bp, synthetic construct
  misc_feature 1..158: note = Synthetic nucleic acid
  source 1..158: mol_type = other DNA
cagacgacggccagtgtcgacgtgcgcctgattatcacttttctgatggcctggtgcctcagttgaacacttcttgcggcgatggttcctggctcttcgatctctgcgggcaaaggtcgtcaggcgggaagtttgtggggatcctacggtcattcagc

SEQ ID NO: 33 - DNA, 158 bp, synthetic construct
  misc_feature 1..158: note = Synthetic nucleic acid
  source 1..158: mol_type = other DNA
cagacgacggccagtgtcgacatgagcaaacaatcacagcatgtattaattgccctgcccaacacttcttgcggcgatggttcctggctcttcgatctggatttgctggtgaatagtagttatttcgcgattaacaagggatcctacggtcattcagc

SEQ ID NO: 34 - DNA, 158 bp, synthetic construct
  misc_feature 1..158: note = Synthetic nucleic acid
  source 1..158: mol_type = other DNA
cagacgacggccagtgtcgacatgactccagtaaaagtgtggcaagagcgcgttgaaacacttcttgcggcgatggttcctggctcttcgatcttattcaccaccgtgatgccttttatttttaaccgcgttcacgtgggatcctacggtcattcagc

SEQ ID NO: 35 - DNA, 158 bp, synthetic construct
  misc_feature 1..158: note = Synthetic nucleic acid
  source 1..158: mol_type = other DNA
cagacgacggccagtgtcgacatgccaaaacgtacagatataaaaagtatcctgattctgggtgcggaacacttcttgcggcgatggttcctggctcttcgatcttcggtgcaggaaatgcacgcacagatcaaacgtggatcctacggtcattcagc

SEQ ID NO: 36 - DNA, 158 bp, synthetic construct
  misc_feature 1..158: note = Synthetic nucleic acid
  source 1..158: mol_type = other DNA
cagacgacggccagtgtcgacatgaaaagaatgttaatcaacgcaactcagcaggaagagttgcgcgttgcaacacttcttgcggcgatggttcctggctcttcgatcgctcctgcgcgtccgcaacctgttgagcgtggatcctacggtcattcagc

SEQ ID NO: 37 - DNA, 158 bp, synthetic construct
  misc_feature 1..158: note = Synthetic nucleic acid
  source 1..158: mol_type = other DNA
cagacgacggccagtgtcgacatgcctaatttctttatcgatcgcccgatttttgcgtggaacacttcttgcggcgatggttcctggctcttcgatcatgaagatatcgagcacagccatactgtcgatcatcatgacggatcctacggtcattcagc

SEQ ID NO: 38 - DNA, 158 bp, synthetic construct
  misc_feature 1..158: note = Synthetic nucleic acid
  source 1..158: mol_type = other DNA
cagacgacggccagtgtcgacatgaaaattctcagcctgcgcctgaaaaacctgaactcattaaaaaacacttcttgcggcgatggttcctggctcttcgatcacagcaaactggaaagtacgtttgcagtgaaacgtggatcctacggtcattcagc

SEQ ID NO: 39 - DNA, 158 bp, synthetic construct
  misc_feature 1..158: note = Synthetic nucleic acid
  source 1..158: mol_type = other DNA
cagacgacggccagtgtcgacatgattgaatggattattcgtcgctcggtggcgaaccgttttttgaacacttcttgcggcgatggttcctggctcttcgatctgatgtggctgcaccgacatcgggtacggaaatatggatcctacggtcattcagc

SEQ ID NO: 40 - DNA, 158 bp, synthetic construct
  misc_feature 1..158: note = Synthetic nucleic acid
  source 1..158: mol_type = other DNA
cagacgacggccagtgtcgacatgcaggtgttacccccgagcagcacaggcggcaacacttcttgcggcgatggttcctggctcttcgatccattgtggaccaaaagccgctttgcccgtcatgaagaggaggcgagaggatcctacggtcattcagc

SEQ ID NO: 41 - DNA, 158 bp, synthetic construct
  misc_feature 1..158: note = Synthetic nucleic acid
  source 1..158: mol_type = other DNA
cagacgacggccagtgtcgacatgaaacgacatctgaatacctgctacaggctggtatggaataacacttcttgcggcgatggttcctggctcttcgatcggtataacggtcaggccacactgaatgtgaccttcgagggatcctacggtcattcagc

SEQ ID NO: 42 - DNA, 158 bp, synthetic construct
  misc_feature 1..158: note = Synthetic nucleic acid
  source 1..158: mol_type = other DNA
cagacgacggccagtgtcgacatggcgaatttctttattgatcgccccatttttgcctgggtgctggcaatcaacacttcttgcggcgatggttcctggctcttcgatcgcttcccgctgaagccgcgcccggaaattggatcctacggtcattcagc

SEQ ID NO: 43 - DNA, 158 bp, synthetic construct
  misc_feature 1..158: note = Synthetic nucleic acid
  source 1..158: mol_type = other DNA
cagacgacggccagtgtcgacatggctaactattttattgatcgcccggtttttgcctgggtaaacacttcttgcggcgatggttcctggctcttcgatctagtggaacatctctttgcccgctttaaaaaagcgcggggatcctacggtcattcagc

SEQ ID NO: 44 - DNA, 158 bp, synthetic construct
  misc_feature 1..158: note = Synthetic nucleic acid
  source 1..158: mol_type = other DNA
cagacgacggccagtgtcgacatggcaaacttttttattcgacgaccgatatttgcatgggtgaacacttcttgcggcgatggttcctggctcttcgatctgttctttgtggtgatccgccgttgctttaaaggagtgggatcctacggtcattcagc

SEQ ID NO: 45 - DNA, 158 bp, synthetic construct
  misc_feature 1..158: note = Synthetic nucleic acid
  source 1..158: mol_type = other DNA
cagacgacggccagtgtcgacatgggggatattatgcgtcccattccgtttgaggaacttttgacaacacttcttgcggcgatggttcctggctcttcgatccatcatcattatctgctgggccgcgtggaggtgagtggatcctacggtcattcagc

SEQ ID NO: 46 - DNA, 158 bp, synthetic construct
  misc_feature 1..158: note = Synthetic nucleic acid
  source 1..158: mol_type = other DNA
cagacgacggccagtgtcgacatgaatcgctgggaaaacattcagctcacccacgaaaaaacacttcttgcggcgatggttcctggctcttcgatcgggttcttttccacgaatttgcacagcgagaataagcaaggatcctacggtcattcagccgc

SEQ ID NO: 47 - DNA, 158 bp, synthetic construct
  misc_feature 1..158: note = Synthetic nucleic acid
  source 1..158: mol_type = other DNA
cagacgacggccagtgtcgacgtgaagttttttgccctcttcatttaccgcccggtggaacacttcttgcggcgatggttcctggctcttcgatcgctgcgtttttcgcgtaaacctaaacaaacggtaaccgaggttggatcctacggtcattcagc

SEQ ID NO: 48 - DNA, 158 bp, synthetic construct
  misc_feature 1..158: note = Synthetic nucleic acid
  source 1..158: mol_type = other DNA
cagacgacggccagtgtcgacatgaccatgattacggattcactggccgtcgttttacaacgtaacacttcttgcggcgatggttcctggctcttcgatcgtcgctaccattaccagttggtctggtgtcaaaaaaaaggatcctacggtcattcagc

SEQ ID NO: 49 - DNA, 158 bp, synthetic construct
  misc_feature 1..158: note = Synthetic nucleic acid
  source 1..158: mol_type = other DNA
cagacgacggccagtgtcgacatgattccacagatttcccaggcacccggcgtcgttaacacttcttgcggcgatggttcctggctcttcgatcgggtacgccatcctgtgcaggctttactggagattattaaaggatcctacggtcattcagccgc

SEQ ID NO: 50 - DNA, 158 bp, synthetic construct
  misc_feature 1..158: note = Synthetic nucleic acid
  source 1..158: mol_type = other DNA
cagacgacggccagtgtcgacatgcaggtcagcagaaggcagttctttaagatctgcgaacacttcttgcggcgatggttcctggctcttcgatcgccggagtttaagtccttccttgtgaatgtggaaaaggtgtcaggatcctacggtcattcagc

SEQ ID NO: 51 - DNA, 158 bp, synthetic construct
  misc_feature 1..158: note = Synthetic nucleic acid
  source 1..158: mol_type = other DNA
cagacgacggccagtgtcgacatggacgtcagtcgcagacaattttttaaaatctgcgcgaacacttcttgcggcgatggttcctggctcttcgatccggaatataaagcgttcttagtcaacatcgagaaggcgcggggatcctacggtcattcagc

SEQ ID NO: 52 - DNA, 158 bp, synthetic construct
  misc_feature 1..158: note = Synthetic nucleic acid
  source 1..158: mol_type = other DNA
cagacgacggccagtgtcgacatgaaggagaataaccttaatcgcgtcatcggatggtctggtttactaacacttcttgcggcgatggttcctggctcttcgatcaacgcgtttctcaccattggagtgcactgggctggatcctacggtcattcagc

SEQ ID NO: 53 - DNA, 158 bp, synthetic construct
  misc_feature 1..158: note = Synthetic nucleic acid
  source 1..158: mol_type = other DNA
cagacgacggccagtgtcgacatgccttttacacttggtcaacgctggatcagcgatacagaaaaacacttcttgcggcgatggttcctggctcttcgatcggatgccctgcgtttgatcgttgtaacgcatcagttaggatcctacggtcattcagc

SEQ ID NO: 54 - DNA, 158 bp, synthetic construct
  misc_feature 1..158: note = Synthetic nucleic acid
  source 1..158: mol_type = other DNA
cagacgacggccagtgtcgacatgccccgcagcacctggttcaaagcattattgttgttaaacacttcttgcggcgatggttcctggctcttcgatctgcagcaaacaatgcccctgatgagtgaaaagaatgaggttggatcctacggtcattcagc

SEQ ID NO: 55 - DNA, 158 bp, synthetic construct
  misc_feature 1..158: note = Synthetic nucleic acid
  source 1..158: mol_type = other DNA
cagacgacggccagtgtcgacatgacacagacgttaagccagcttgaaaacagcggcgaacacttcttgcggcgatggttcctggctcttcgatctaacctgttctgctcctgcgtaccgattagcgaataccagccaggatcctacggtcattcagc

SEQ ID NO: 56 - DNA, 158 bp, synthetic construct
  misc_feature 1..158: note = Synthetic nucleic acid
  source 1..158: mol_type = other DNA
cagacgacggccagtgtcgacatgatcatccactttactttaaatggcgcgcctcaggaaacacttcttgcggcgatggttcctggctcttcgatcttcacaccggagaaaatactcactgcgctggaaaaaataaacggatcctacggtcattcagc

SEQ ID NO: 57 - DNA, 158 bp, synthetic construct
  misc_feature 1..158: note = Synthetic nucleic acid
  source 1..158: mol_type = other DNA
cagacgacggccagtgtcgacatgggcatcaaacaacacaatgggaataccaaagcagatcgtaacacttcttgcggcgatggttcctggctcttcgatcagaagcaagtcaacggaggatatcgcttcagctttattggatcctacggtcattcagc

SEQ ID NO: 58 - DNA, 158 bp, synthetic construct
  misc_feature 1..158: note = Synthetic nucleic acid
  source 1..158: mol_type = other DNA
cagacgacggccagtgtcgacatggaaaagacatataacccacaagatatcgaacagccgctttacgagcaaacacttcttgcggcgatggttcctggctcttcgatcgaacagcaggctgttatcgccgcgctggtgggatcctacggtcattcagc

SEQ ID NO: 59 - DNA, 158 bp, synthetic construct
  misc_feature 1..158: note = Synthetic nucleic acid
  source 1..158: mol_type = other DNA
cagacgacggccagtgtcgacttgaaataccttgcttcttttcgtacaaccctgaaagcctcgcgaacacttcttgcggcgatggttcctggctcttcgatctatgccgagagggtcaggaaatcgcgggattcgaccggatcctacggtcattcagc

SEQ ID NO: 60 - DNA, 158 bp, synthetic construct
  misc_feature 1..158: note = Synthetic nucleic acid
  source 1..158: mol_type = other DNA
cagacgacggccagtgtcgacatgaagccgctctcttcaccgttacagcagtactggcagaccgttaacacttcttgcggcgatggttcctggctcttcgatcgggcaagctggcagaagtggctggtggaagaaaatggatcctacggtcattcagc

SEQ ID NO: 61 - DNA, 158 bp, synthetic construct
  misc_feature 1..158: note = Synthetic nucleic acid
  source 1..158: mol_type = other DNA
cagacgacggccagtgtcgacatggataagatcgaagttcggggcgcccgcacccataatctaacacttcttgcggcgatggttcctggctcttcgatcgcatcacacacggcacgcttccttaagccgatgctgttaggatcctacggtcattcagc

SEQ ID NO: 62 - DNA, 158 bp, synthetic construct
  misc_feature 1..158: note = Synthetic nucleic acid
  source 1..158: mol_type = other DNA
cagacgacggccagtgtcgacatgagtgactataaatcaaccctgaatttgccggaaacagggttccaacacttcttgcggcgatggttcctggctcttcgatccgccggtgacggtgaaaaacgtaagtttgccagaggatcctacggtcattcagc

SEQ ID NO: 63 - DNA, 158 bp, synthetic construct
  misc_feature 1..158: note = Synthetic nucleic acid
  source 1..158: mol_type = other DNA
cagacgacggccagtgtcgacatgcagaacagcgctttgaaagcctggttggactcttcttaaacacttcttgcggcgatggttcctggctcttcgatccaacaagatctggttaatgacgcgctgaacgtcgaaaacggatcctacggtcattcagc

SEQ ID NO: 64 - DNA, 158 bp, synthetic construct
  misc_feature 1..158: note = Synthetic nucleic acid
  source 1..158: mol_type = other DNA
cagacgacggccagtgtcgacatggttcagatcccccaaaatccacttatccttgtagatggttcatcttataacacttcttgcggcgatggttcctggctcttcgatcgtggcgaaaactgggatcaggcgcacaggggatcctacggtcattcagc

SEQ ID NO: 65 - DNA, 158 bp, synthetic construct
  misc_feature 1..158: note = Synthetic nucleic acid
  source 1..158: mol_type = other DNA
cagacgacggccagtgtcgacatgaccaactacagcctgcgcgcacgcatgatgattctgataacacttcttgcggcgatggttcctggctcttcgatcgataatgtcgcgcgcgaagccagcaaaattctcgggtgtggatcctacggtcattcagc

SEQ ID NO: 66 - DNA, 158 bp, synthetic construct
  misc_feature 1..158: note = Synthetic nucleic acid
  source 1..158: mol_type = other DNA
cagacgacggccagtgtcgacgtgaatttaaccctgacccgaagactctggatgggctttaacacttcttgcggcgatggttcctggctcttcgatctggaagcatggttgcataagaaagacctgaacgcgattttgggatcctacggtcattcagc

SEQ ID NO: 67 - DNA, 158 bp, synthetic construct
  misc_feature 1..158: note = Synthetic nucleic acid
  source 1..158: mol_type = other DNA
cagacgacggccagtgtcgacatgacgcatctggaactggttcccgtcccgcctaacacttcttgcggcgatggttcctggctcttcgatctggtgatgggcttaagtatcctgctgctgaaaaaacaggagggaatcggatcctacggtcattcagc

SEQ ID NO: 68 - DNA, 158 bp, synthetic construct
  misc_feature 1..158: note = Synthetic nucleic acid
  source 1..158: mol_type = other DNA
cagacgacggccagtgtcgacatggctacaattcatgtagacggcaaagaatacgaggtcaacggaaacacttcttgcggcgatggttcctggctcttcgatccgcatcttgaggatctcaaggaggcacaacaaaacggatcctacggtcattcagc

SEQ ID NO: 69 - DNA, 158 bp, synthetic construct
  misc_feature 1..158: note = Synthetic nucleic acid
  source 1..158: mol_type = other DNA
cagacgacggccagtgtcgacatgctaatcaaattgttaactaaagttttcggtagtcgtaacgatcgcaccctaacacttcttgcggcgatggttcctggctcttcgatcaagcagtgccatggccgcctgcaactgggatcctacggtcattcagc

SEQ ID NO: 70 - DNA, 158 bp, synthetic construct
  misc_feature 1..158: note = Synthetic nucleic acid
  source 1..158: mol_type = other DNA
cagacgacggccagtgtcgacatgctgattccgtcaaaactaagtcgtccggttcgactcgacaacacttcttgcggcgatggttcctggctcttcgatccccagcaattgctgaagatgatggggtacggcgtggtaggatcctacggtcattcagc

SEQ ID NO: 71 - DNA, 158 bp, synthetic construct
  misc_feature 1..158: note = Synthetic nucleic acid
  source 1..158: mol_type = other DNA
cagacgacggccagtgtcgacatgtttaaagaaatttttacccggctcattcgccatttaccttcccgtaacacttcttgcggcgatggttcctggctcttcgatcggttctatagccgtcgttacggctggcaagctggatcctacggtcattcagc

SEQ ID NO: 72 - DNA, 158 bp, synthetic construct
  misc_feature 1..158: note = Synthetic nucleic acid
  source 1..158: mol_type = other DNA
cagacgacggccagtgtcgacatgaataacgaacccttacgtcccgaccccgatcgtaacacttcttgcggcgatggttcctggctcttcgatcagcaaactgcccctgaacttgaagaatttcatgaggatatgtttggatcctacggtcattcagc

SEQ ID NO: 73 - DNA, 158 bp, synthetic construct
  misc_feature 1..158: note = Synthetic nucleic acid
  source 1..158: mol_type = other DNA
cagacgacggccagtgtcgacatggctgttactaatgtcgctgaacttaacgcactcgtagaaacacttcttgcggcgatggttcctggctcttcgatcccggctaaagctgagaaaaaagcgaaaaaatccgctgcgggatcctacggtcattcagc

SEQ ID NO: 74 - DNA, 158 bp, synthetic construct
  misc_feature 1..158: note = Synthetic nucleic acid
  source 1..158: mol_type = other DNA
cagacgacggccagtgtcgacatgtcgtcaaccctacgagaagccagtaaggacacaacacttcttgcggcgatggttcctggctcttcgatcaacgacggcattttgcattatgtcattcgtaatatgttgaagaggggatcctacggtcattcagc

SEQ ID NO: 75 - DNA, 158 bp, synthetic construct
  misc_feature 1..158: note = Synthetic nucleic acid
  source 1..158: mol_type = other DNA
cagacgacggccagtgtcgacatgaatacccttccagaacagtacgcaaacaccgctctcccaacacttcttgcggcgatggttcctggctcttcgatccggttgacagaggccctcaatccaaacgataaagggaacggatcctacggtcattcagc

SEQ ID NO: 76 - DNA, 158 bp, synthetic construct
  misc_feature 1..158: note = Synthetic nucleic acid
  source 1..158: mol_type = other DNA
cagacgacggccagtgtcgacatgacagatgtaacgattaaaacgctggccgcagagaacacttcttgcggcgatggttcctggctcttcgatctcgaagtattcgaaatcatcgagatccaacgtaccattgctactggatcctacggtcattcagc

SEQ ID NO: 77 - DNA, 158 bp, synthetic construct
  misc_feature 1..158: note = Synthetic nucleic acid
  source 1..158: mol_type = other DNA
cagacgacggccagtgtcgacatgcgtcagaaagagacaacggccacgacccgaacacttcttgcggcgatggttcctggctcttcgatcgaaaaatacatcagcgacattgacagttatgtcaagagcttgctgataggatcctacggtcattcagc

SEQ ID NO: 78 - DNA, 158 bp, synthetic construct
  misc_feature 1..158: note = Synthetic nucleic acid
  source 1..158: mol_type = other DNA
cagacgacggccagtgtcgacatgagtcagcgaggactggaagcactactgcgaccaaaatcgataaacacttcttgcggcgatggttcctggctcttcgatcttacgctaaatcttgcccagcgcgaggaatcaagaggatcctacggtcattcagc

SEQ ID NO: 79 - DNA, 158 bp, synthetic construct
  misc_feature 1..158: note = Synthetic nucleic acid
  source 1..158: mol_type = other DNA
cagacgacggccagtgtcgacatgaacgaacaatattccgcattgcgtagtaatgtcagtatgctcggaacacttcttgcggcgatggttcctggctcttcgatcgggattgcggcaggtatgcgtaataccggccatggatcctacggtcattcagc

SEQ ID NO: 80 - DNA, 158 bp, synthetic construct
  misc_feature 1..158: note = Synthetic nucleic acid
  source 1..158: mol_type = other DNA
cagacgacggccagtgtcgacatgctgggtaaatataaagccgttctcgcgctgttattactgattattaacacttcttgcggcgatggttcctggctcttcgatccgcaaggaaaagagtgtgaggaaaaacaatttggatcctacggtcattcagc

SEQ ID NO: 81 - DNA, 158 bp, synthetic construct
  misc_feature 1..158: note = Synthetic nucleic acid
  source 1..158: mol_type = other DNA
cagacgacggccagtgtcgacatgtcatatctgaatttaagactttaccagcgaaacacacaatgcttgcatattaacacttcttgcggcgatggttcctggctcttcgatccccagctatcagctgaatgtcgtgtcggatcctacggtcattcagc

SEQ ID NO: 82 - DNA, 158 bp, synthetic construct
  misc_feature 1..158: note = Synthetic nucleic acid
  source 1..158: mol_type = other DNA
cagacgacggccagtgtcgacatgaaagcagtatctcgcgttcacatcaccccgcatatgcactggaacacttcttgcggcgatggttcctggctcttcgatcgccagtcacggacgttcagttaccggcttgcccacggatcctacggtcattcagc

SEQ ID NO: 83 - DNA, 158 bp, synthetic construct
  misc_feature 1..158: note = Synthetic nucleic acid
  source 1..158: mol_type = other DNA
cagacgacggccagtgtcgacatgagtcaggaaacgcccgcttcgacgactgaagcgcaaacacttcttgcggcgatggttcctggctcttcgatcccgaaagagtggcgtgaatggggaactgcgcttcccaaacttggatcctacggtcattcagc

SEQ ID NO: 84 - DNA, 158 bp, synthetic construct
  misc_feature 1..158: note = Synthetic nucleic acid
  source 1..158: mol_type = other DNA
cagacgacggccagtgtcgacatgagcaagagcaccgctgagatccgtcaggcgtttctaacacttcttgcggcgatggttcctggctcttcgatcttagccagtgtgaaaggctgggtcagcgcgaaattgcaaatcggatcctacggtcattcagc

SEQ ID NO: 85 - DNA, 158 bp, synthetic construct
  misc_feature 1..158: note = Synthetic nucleic acid
  source 1..158: mol_type = other DNA
cagacgacggccagtgtcgacatgagcgaccttgcgagagaaattacaccggtcaacattgagaacacttcttgcggcgatggttcctggctcttcgatccggaagtggacgttgacgacgagccagaagaagaacgtggatcctacggtcattcagc

SEQ ID NO: 86 - DNA, 158 bp, synthetic construct
  misc_feature 1..158: note = Synthetic nucleic acid
  source 1..158: mol_type = other DNA
cagacgacggccagtgtcgacatgagtatcctgacccggtggttgcttatcccgccggtaacacttcttgcggcgatggttcctggctcttcgatcgaaacggcacaaccatcggatcaggctttggctcaacaaaaaggatcctacggtcattcagc

SEQ ID NO: 87 - DNA, 158 bp, synthetic construct
  misc_feature 1..158: note = Synthetic nucleic acid
  source 1..158: mol_type = other DNA
cagacgacggccagtgtcgacatgactcaacagccacaagccaaataccgtcacgattataacacttcttgcggcgatggttcctggctcttcgatcctggcgatctgtacgagaagataactaaagcactggctagaggatcctacggtcattcagc

SEQ ID NO: 88 - DNA, 158 bp, synthetic construct
  misc_feature 1..158: note = Synthetic nucleic acid
  source 1..158: mol_type = other DNA
cagacgacggccagtgtcgacatgaaaatacccactactacggatattccgcagaggtatacctggtaacacttcttgcggcgatggttcctggctcttcgatctatttcggcagtttgcacacatcctggctcatggggatcctacggtcattcagc

SEQ ID NO: 89 - DNA, 158 bp, synthetic construct
  misc_feature 1..158: note = Synthetic nucleic acid
  source 1..158: mol_type = other DNA
cagacgacggccagtgtcgacatgagcacaaaaccactcttcctgttacggaaagcgaaaaaatcataacacttcttgcggcgatggttcctggctcttcgatcgccccgctgggctaaggaatatgcaaatgaccgaggatcctacggtcattcagc

SEQ ID NO: 90 - DNA, 158 bp, synthetic construct
  misc_feature 1..158: note = Synthetic nucleic acid
  source 1..158: mol_type = other DNA
cagacgacggccagtgtcgacatgtatagaactcatcgacaacacagcctgttaagctctggtgaacacttcttgcggcgatggttcctggctcttcgatcctctgcgattacgcgaatggatgccatatgcagaggcggatcctacggtcattcagc

SEQ ID NO: 91 - DNA, 158 bp, synthetic construct
  misc_feature 1..158: note = Synthetic nucleic acid
  source 1..158: mol_type = other DNA
cagacgacggccagtgtcgacatgggtaaagctcttgtcatcgttgagtccccggaacacttcttgcggcgatggttcctggctcttcgatcgtcagcattttatgttgatggcaaatgggttgaaggaaaaaaattgggatcctacggtcattcagc

SEQ ID NO: 92 - DNA, 158 bp, synthetic construct
  misc_feature 1..158: note = Synthetic nucleic acid
  source 1..158: mol_type = other DNA
cagacgacggccagtgtcgacgtgctagaagaataccgtaagcacgtagctgagcgtgccgaacacttcttgcggcgatggttcctggctcttcgatccgagaaagccgatggggtgattttccagactgcggttaacggatcctacggtcattcagc

SEQ ID NO: 93 - DNA, 158 bp, synthetic construct
  misc_feature 1..158: note = Synthetic nucleic acid
  source 1..158: mol_type = other DNA
cagacgacggccagtgtcgacatgcaagagcaataccgcccggaagagatagaatccaaaaacacttcttgcggcgatggttcctggctcttcgatctttacgtaccaggtaaactcctcaatctggtcgttggcccgggatcctacggtcattcagc

SEQ ID NO: 94 - DNA, 158 bp, synthetic construct
  misc_feature 1..158: note = Synthetic nucleic acid
  source 1..158: mol_type = other DNA
cagacgacggccagtgtcgacatgcgtctggatcgtcttactaataaattccagcttgctcttgcaacacttcttgcggcgatggttcctggctcttcgatcgaagttaatgaagaccggattgtcgccgtccagacgggatcctacggtcattcagc

SEQ ID NO: 95 - DNA, 158 bp, synthetic construct
  misc_feature 1..158: note = Synthetic nucleic acid
  source 1..158: mol_type = other DNA
cagacgacggccagtgtcgacgtgaagttcgtaaagtattttttgatccttgcagtctgttgcattctgctaacacttcttgcggcgatggttcctggctcttcgatcgataatggcgaggcacaggaattgttccatggatcctacggtcattcagc

SEQ ID NO: 96 - DNA, 158 bp, synthetic construct
  misc_feature 1..158: note = Synthetic nucleic acid
  source 1..158: mol_type = other DNA
cagacgacggccagtgtcgacatgaacaataacgatctctttcaggcatcacgtcggcgttttctaacacttcttgcggcgatggttcctggctcttcgatctgcgaatatgttcccgcgtcgcaggtgaaatcattcggatcctacggtcattcagc

SEQ ID NO: 97 - DNA, 158 bp, synthetic construct
  misc_feature 1..158: note = Synthetic nucleic acid
  source 1..158: mol_type = other DNA
cagacgacggccagtgtcgacatgaataagacaactgagtacattgacgcaatgcccatcgccgcaaaacacttcttgcggcgatggttcctggctcttcgatcggcattgcgtaaaccggatgcggcttcgcaatctggatcctacggtcattcagc

SEQ ID NO: 98 - DNA, 158 bp, synthetic construct
  misc_feature 1..158: note = Synthetic nucleic acid
  source 1..158: mol_type = other DNA
cagacgacggccagtgtcgacatgagcaaagtcagactcgcaattatcggtaacggtatggtcgaacacttcttgcggcgatggttcctggctcttcgatcacgtatcccagtaactctggtggaggacaacgcagctggatcctacggtcattcagc

SEQ ID NO: 99 - DNA, 158 bp, synthetic construct
  misc_feature 1..158: note = Synthetic nucleic acid
  source 1..158: mol_type = other DNA
cagacgacggccagtgtcgacatggccgggaatgaccgcgagccaattggacgaacacttcttgcggcgatggttcctggctcttcgatcagcgacggtgtagccggttggatcaaggatatgtttggtagtaatgtgggatcctacggtcattcagc

SEQ ID NO: 100 - DNA, 158 bp, synthetic construct
  misc_feature 1..158: note = Synthetic nucleic acid
  source 1..158: mol_type = other DNA
cagacgacggccagtgtcgacatgcctttacgacggttctccccaggactgaaagcccagtttaacacttcttgcggcgatggttcctggctcttcgatccggcggtgacgcagacaggagaagagaatgagagtatcggatcctacggtcattcagc

SEQ ID NO: 101 - DNA, 158 bp, synthetic construct
  misc_feature 1..158: note = Synthetic nucleic acid
  source 1..158: mol_type = other DNA
cagacgacggccagtgtcgacatgccacaacgacaccaccagggacataaacgcacaaacacttcttgcggcgatggttcctggctcttcgatcaacctacaacctctgtattacaaggcacagcgcagtgccatccgggatcctacggtcattcagc

SEQ ID NO: 102 - DNA, 158 bp, synthetic construct
  misc_feature 1..158: note = Synthetic nucleic acid
  source 1..158: mol_type = other DNA
cagacgacggccagtgtcgacatgtcacaaactatcgacctgaccctggacggcctgtcctaacacttcttgcggcgatggttcctggctcttcgatctaacgccaaccggttgctgcggtttaaaccgaaggaacggggatcctacggtcattcagc

SEQ ID NO: 103 - DNA, 158 bp, synthetic construct
  misc_feature 1..158: note = Synthetic nucleic acid
  source 1..158: mol_type = other DNA
cagacgacggccagtgtcgacatggccctgattgtggaatttatttgtgagctacctaacggcgtaaacacttcttgcggcgatggttcctggctcttcgatctcgccagcctgctgcaacatgaactggaactggtgggatcctacggtcattcagc

SEQ ID NO: 104 - DNA, 158 bp, synthetic construct
  misc_feature 1..158: note = Synthetic nucleic acid
  source 1..158: mol_type = other DNA
cagacgacggccagtgtcgacatgttaacgattcaatttctctgtcctttgcctaacggtctacatgctaacacttcttgcggcgatggttcctggctcttcgatctgacgctgctggaaacagaattaaccttcaaaggatcctacggtcattcagc

SEQ ID NO: 105 - DNA, 158 bp, synthetic construct
  misc_feature 1..158: note = Synthetic nucleic acid
  source 1..158: mol_type = other DNA
cagacgacggccagtgtcgacatgaaactcagtcgtcgtagctttatgaaagctaacgccgttgaacacttcttgcggcgatggttcctggctcttcgatccttcaagaagtgcgcggtcaaactggagaaggtgacgggatcctacggtcattcagc

SEQ ID NO: 106 - DNA, 158 bp, synthetic construct
  misc_feature 1..158: note = Synthetic nucleic acid
  source 1..158: mol_type = other DNA
cagacgacggccagtgtcgacatgttgagaatgaccccacttgcatcagcaatcgtagcaacacttcttgcggcgatggttcctggctcttcgatcggtaaagagattgatgaaagtagaaattatatttgccagggaggatcctacggtcattcagc

SEQ ID NO: 107 - DNA, 158 bp, synthetic construct
  misc_feature 1..158: note = Synthetic nucleic acid
  source 1..158: mol_type = other DNA
cagacgacggccagtgtcgacatgcgagtgttgaagttcggcggtacatcagtggaacacttcttgcggcgatggttcctggctcttcgatcctttgctgatctgctacgtaccctctcatggaagttaggagtcgaaggatcctacggtcattcagc

SEQ ID NO: 108 - DNA, 158 bp, synthetic construct
  misc_feature 1..158: note = Synthetic nucleic acid
  source 1..158: mol_type = other DNA
cagacgacggccagtgtcgacatgaatgctccgtttacatattcatcgcccacgcttagcgtaaacacttcttgcggcgatggttcctggctcttcgatcccgatcatatctggcatatcgatccggtgagattgtccggatcctacggtcattcagc

SEQ ID NO: 109 - DNA, 158 bp, synthetic construct
  misc_feature 1..158: note = Synthetic nucleic acid
  source 1..158: mol_type = other DNA
cagacgacggccagtgtcgacgtgaatatttatcgactctcttttgtatcctgcctggtcatggcgataacacttcttgcggcgatggttcctggctcttcgatcacgaccaaacgcctgattttaccttgtcattgcggatcctacggtcattcagc

SEQ ID NO: 110 - DNA, 158 bp, synthetic construct
  misc_feature 1..158: note = Synthetic nucleic acid
  source 1..158: mol_type = other DNA
cagacgacggccagtgtcgacatgaaaacgaaaatccctgatgcggtattggctgctaacacttcttgcggcgatggttcctggctcttcgatcggaatccgtcacatacaaaccttgttcaggttgaaaaggtgacgggatcctacggtcattcagc

SEQ ID NO: 111 - DNA, 158 bp, synthetic construct
  misc_feature 1..158: note = Synthetic nucleic acid
  source 1..158: mol_type = other DNA
cagacgacggccagtgtcgacatgatgattttgagtattctcgctacggttgtcctgctcggcgcaacacttcttgcggcgatggttcctggctcttcgatcttgccggagaaagtgcggaaagttgaagccgcgaggggatcctacggtcattcagc

SEQ ID NO: 112 - DNA, 158 bp, synthetic construct
  misc_feature 1..158: note = Synthetic nucleic acid
  source 1..158: mol_type = other DNA
cagacgacggccagtgtcgacatgtcacaagatcctttccaggaacgcgaagctgaaaaatacgcgaataacacttcttgcggcgatggttcctggctcttcgatcagcgtgcggcgaagaaaaaagtggcagagtccggatcctacggtcattcagc

SEQ ID NO: 113 - DNA, 158 bp, synthetic construct
  misc_feature 1..158: note = Synthetic nucleic acid
  source 1..158: mol_type = other DNA
cagacgacggccagtgtcgacatgaccacactgaaactggacacgctcagcgaccgaacacttcttgcggcgatggttcctggctcttcgatcgacgctcaggacgatatcatcgcccgtactgaacatatgctgagtggatcctacggtcattcagc

SEQ ID NO: 114 - DNA, 158 bp, synthetic construct
  misc_feature 1..158: note = Synthetic nucleic acid
  source 1..158: mol_type = other DNA
cagacgacggccagtgtcgacatgagtgtgattgcgcaggcaggggcgaaaggtcgtaacacttcttgcggcgatggttcctggctcttcgatcgggcgattcagtcggatatcaaccggctggcacagttgttgattggatcctacggtcattcagc

SEQ ID NO: 115 - DNA, 158 bp, synthetic construct
  misc_feature 1..158: note = Synthetic nucleic acid
  source 1..158: mol_type = other DNA
cagacgacggccagtgtcgacatggcgatgaaaaagttgctcatagcgtcgctgctaacacttcttgcggcgatggttcctggctcttcgatcgacaaggcagaacagttccagtttaacatcggtaaaacctggaggggatcctacggtcattcagc

SEQ ID NO: 116 - DNA, 158 bp, synthetic construct
  misc_feature 1..158: note = Synthetic nucleic acid
  source 1..158: mol_type = other DNA
cagacgacggccagtgtcgacatgacattaacaagacgtgaatttattaaacacagcggtattgccgctgaacacttcttgcggcgatggttcctggctcttcgatcggcgtttgatcagccagctgttcaggcgagaggatcctacggtcattcagc

SEQ ID NO: 117 - DNA, 158 bp, synthetic construct
  misc_feature 1..158: note = Synthetic nucleic acid
  source 1..158: mol_type = other DNA
cagacgacggccagtgtcgacgtgtcgtcgttgcccgttgctgccgtcttacctgaattaaacacttcttgcggcgatggttcctggctcttcgatccaaatactgcaccgacgcgacggacgaaaaagtattcgagcggatcctacggtcattcagc

SEQ ID NO: 118 - DNA, 158 bp, synthetic construct
  misc_feature 1..158: note = Synthetic nucleic acid
  source 1..158: mol_type = other DNA
cagacgacggccagtgtcgacatgtccaaaaatgaacgaatggtgggcatcagccgcaaacacttcttgcggcgatggttcctggctcttcgatcaaacccgcagcacactaatctggtcgagatcgaaaaaataggtggatcctacggtcattcagc

SEQ ID NO: 119 - DNA, 158 bp, synthetic construct
  misc_feature 1..158: note = Synthetic nucleic acid
  source 1..158: mol_type = other DNA
cagacgacggccagtgtcgacatgaaaatccataccacagaggcgctcatgaaggctgaaatcaaacacttcttgcggcgatggttcctggctcttcgatcgtcgcacagcaatcttgtccagatcgaaaaggttcatggatcctacggtcattcagc

SEQ ID NO: 120 - DNA, 158 bp, synthetic construct
  misc_feature 1..158: note = Synthetic nucleic acid
  source 1..158: mol_type = other DNA
cagacgacggccagtgtcgacatgtattcaagtagcagaaaaaggtgcccgaaaaccaaatgggaacacttcttgcggcgatggttcctggctcttcgatccttatacgttgaattcgatatgacattcagatttttgggatcctacggtcattcagc

SEQ ID NO: 121 - DNA, 158 bp, synthetic construct
  misc_feature 1..158: note = Synthetic nucleic acid
  source 1..158: mol_type = other DNA
cagacgacggccagtgtcgacatgtccggctggccacgaatttactacaaattactgaatttaccattaagcataacacttcttgcggcgatggttcctggctcttcgatcgagagtgcgacgcagggcgaagggctaggatcctacggtcattcagc

SEQ ID NO: 122 - DNA, 158 bp, synthetic construct
  misc_feature 1..158: note = Synthetic nucleic acid
  source 1..158: mol_type = other DNA
cagacgacggccagtgtcgacatgattgcacgttggttctggcgcgaatggcgttcgccaacacttcttgcggcgatggttcctggctcttcgatcctggttaagggtaaggcgctgttcaggcagtttgcggggcccggatcctacggtcattcagc

SEQ ID NO: 123 - DNA, 158 bp, synthetic construct
  misc_feature 1..158: note = Synthetic nucleic acid
  source 1..158: mol_type = other DNA
cagacgacggccagtgtcgacatgtcgaattcttatgactcctccagtatcaaagtcctgaaagggctaacacttcttgcggcgatggttcctggctcttcgatcaacgccctgaaagcggcgaatatcgatattttcggatcctacggtcattcagc

SEQ ID NO: 124 - DNA, 158 bp, synthetic construct
  misc_feature 1..158: note = Synthetic nucleic acid
  source 1..158: mol_type = other DNA
cagacgacggccagtgtcgacatgaagctaaccgatgcggataatgccgccgatggcatttttttaacacttcttgcggcgatggttcctggctcttcgatcggctggatgagcagcgtgttaccgctgaaaatcggatcctacggtcattcagccgc

SEQ ID NO: 125 - DNA, 158 bp, synthetic construct
  misc_feature 1..158: note = Synthetic nucleic acid
  source 1..158: mol_type = other DNA
cagacgacggccagtgtcgacatgtcacaacctatttttaacgataagcaatttcaggaagcgctttcacaacacttcttgcggcgatggttcctggctcttcgatctcaggctcgtatctggcaggcaaaacgcggaggatcctacggtcattcagc

SEQ ID NO: 126 - DNA, 158 bp, synthetic construct
  misc_feature 1..158: note = Synthetic nucleic acid
  source 1..158: mol_type = other DNA
cagacgacggccagtgtcgacatggcaattaacaatacaggctcgcgacgattactcgtcaaacacttcttgcggcgatggttcctggctcttcgatcctatattgtggcttatgcgctgccggatgatgtgaagctgggatcctacggtcattcagc

SEQ ID NO: 127 - DNA, 158 bp, synthetic construct
  misc_feature 1..158: note = Synthetic nucleic acid
  source 1..158: mol_type = other DNA
cagacgacggccagtgtcgacatgaaattcagtgaactgtggttacgcgaatgggtgaaccaacacttcttgcggcgatggttcctggctcttcgatcggcattaaaagagcgattccaggcatcattgagggatccgggatcctacggtcattcagc

SEQ ID NO: 128 - DNA, 158 bp, synthetic construct
  misc_feature 1..158: note = Synthetic nucleic acid
  source 1..158: mol_type = other DNA
cagacgacggccagtgtcgacatgttaaaaaaaacgttactggcctacaccattggttttgccttttctaacacttcttgcggcgatggttcctggctcttcgatctctatgagacagcaacaggagagtgccaaagcggatcctacggtcattcagc

SEQ ID NO: 129 - DNA, 158 bp, synthetic construct
  misc_feature 1..158: note = Synthetic nucleic acid
  source 1..158: mol_type = other DNA
cagacgacggccagtgtcgacatgtccaacaatggctcgtcaccgctggtgctttggtataaaacacttcttgcggcgatggttcctggctcttcgatcgtgcaaacctggttaagcctggctgaactgaagaaaaaaggatcctacggtcattcagc

SEQ ID NO: 130 - DNA, 158 bp, synthetic construct
  misc_feature 1..158: note = Synthetic nucleic acid
  source 1..158: mol_type = other DNA
cagacgacggccagtgtcgacatgaagcgagttcttattcctggcgtcattttatgtggcgaacacttcttgcggcgatggttcctggctcttcgatctggccgtactttctggcttgatgtcagcatgaaatttcacggatcctacggtcattcagc

SEQ ID NO: 131 - DNA, 158 bp, synthetic construct
  misc_feature 1..158: note = Synthetic nucleic acid
  source 1..158: mol_type = other DNA
cagacgacggccagtgtcgacatgaaaaaacgtatccccactctcctggccaccatgattaacacttcttgcggcgatggttcctggctcttcgatctgctgcgttcgaacattctgccgtatcaaaacactttgcaaggatcctacggtcattcagc

SEQ ID NO: 132 - DNA, 158 bp, synthetic construct
  misc_feature 1..158: note = Synthetic nucleic acid
  source 1..158: mol_type = other DNA
cagacgacggccagtgtcgacatgaatcctgagcgttctgaacgcattgaaatccccgtattaacacttcttgcggcgatggttcctggctcttcgatcaatgaaccgtctggtatgcaggttgtgactgcaaaaacgggatcctacggtcattcagc

SEQ ID NO: 133 - DNA, 158 bp, synthetic construct
  misc_feature 1..158: note = Synthetic nucleic acid
  source 1..158: mol_type = other DNA
cagacgacggccagtgtcgacgtggcgcaggcaggttttatcttaacccgacactaacacttcttgcggcgatggttcctggctcttcgatcggataattttgctacacttatgaccgggcaacttgggctatttcgtggatcctacggtcattcagc

SEQ ID NO: 134 - DNA, 158 bp, synthetic construct
  misc_feature 1..158: note = Synthetic nucleic acid
  source 1..158: mol_type = other DNA
cagacgacggccagtgtcgacatgaaaagaaaactattctggatttgtgcagtggctatggggatgaaacacttcttgcggcgatggttcctggctcttcgatctagtcgtcgtcgtcttaacccggataacgagtctggatcctacggtcattcagc

SEQ ID NO: 135 - DNA, 158 bp, synthetic construct
  misc_feature 1..158: note = Synthetic nucleic acid
  source 1..158: mol_type = other DNA
cagacgacggccagtgtcgacatgaagcaaattcgtctgctggcgcagtattatgttgacctaacacttcttgcggcgatggttcctggctcttcgatcgtgctgaaagcgtgggtggcaaaagccactaaaaaattcggatcctacggtcattcagc

SEQ ID NO: 136 - DNA, 158 bp, synthetic construct
  misc_feature 1..158: note = Synthetic nucleic acid
  source 1..158: mol_type = other DNA
cagacgacggccagtgtcgacttggccaactcatcctcacgatattccgttctgactgccgcaacacttcttgcggcgatggttcctggctcttcgatcctgacacttacagcgtttgaaccaccggccagctcacagggatcctacggtcattcagc

SEQ ID NO: 137 - DNA, 158 bp, synthetic construct
  misc_feature 1..158: note = Synthetic nucleic acid
  source 1..158: mol_type = other DNA
cagacgacggccagtgtcgacatgacgccgttacgcgtttttcgtaaaacaacacctttggttaaaacacttcttgcggcgatggttcctggctcttcgatccgcacgctgtatatgcaggggtcgttgaagttcgcgggatcctacggtcattcagc

SEQ ID NO: 138 - DNA, 158 bp, synthetic construct
  misc_feature 1..158: note = Synthetic nucleic acid
  source 1..158: mol_type = other DNA
cagacgacggccagtgtcgacatgatgaatgattcgttctgccgcattattgcgggtgaaattcaggcgcaacacttcttgcggcgatggttcctggctcttcgatcgctggcggcggcaatgggcaaaaaacgtacgggatcctacggtcattcagc

SEQ ID NO: 139 - DNA, 158 bp, synthetic construct
  misc_feature 1..158: note = Synthetic nucleic acid
  source 1..158: mol_type = other DNA
cagacgacggccagtgtcgacatgaaaattagcgatggaaactggttgattcaacctggcctcaatttaacacttcttgcggcgatggttcctggctcttcgatccctcaagggaatgcgctgacaattacgttgaggggatcctacggtcattcagc

SEQ ID NO: 140 - DNA, 158 bp, synthetic construct
  misc_feature 1..158: note = Synthetic nucleic acid
  source 1..158: mol_type = other DNA
cagacgacggccagtgtcgacatgcctcgcttgttaaccaaacgcggctgctggataaaacacttcttgcggcgatggttcctggctcttcgatctgacgtggggcaaatcgcgacagtgaaatttgtcatgcaaaacggatcctacggtcattcagc

SEQ ID NO: 141 - DNA, 158 bp, synthetic construct
  misc_feature 1..158: note = Synthetic nucleic acid
  source 1..158: mol_type = other DNA
cagacgacggccagtgtcgacatgttgaaggccaggaattgcggctggatacgtttaaacacttcttgcggcgatggttcctggctcttcgatccaatacgggaacaagcgatgagaaaacttgatgagttgtatctaggatcctacggtcattcagc

SEQ ID NO: 142 - DNA, 158 bp, synthetic construct
  misc_feature 1..158: note = Synthetic nucleic acid
  source 1..158: mol_type = other DNA
cagacgacggccagtgtcgacatgaaatggctatgttcagtaggaatcgcggtgagtctggccaacacttcttgcggcgatggttcctggctcttcgatcccgcacgcgttaagaaaggcgagtttgagttgctggtgggatcctacggtcattcagc

SEQ ID NO: 143 - DNA, 158 bp, synthetic construct
  misc_feature 1..158: note = Synthetic nucleic acid
  source 1..158: mol_type = other DNA
cagacgacggccagtgtcgacatgacgaatcgtatctctcgcctcaaaactgcactgtttgccaataccaacacttcttgcggcgatggttcctggctcttcgatcacatcatccgccggacagcgcatcagctgagtggatcctacggtcattcagc

SEQ ID NO: 144 - DNA, 158 bp, synthetic construct
  misc_feature 1..158: note = Synthetic nucleic acid
  source 1..158: mol_type = other DNA
cagacgacggccagtgtcgacatgaaggtagatattgataccagcgataagctgtacgccgacaacacttcttgcggcgatggttcctggctcttcgatcaggatgttatttcacgtacctttacccaggcgctcgggggatcctacggtcattcagc

SEQ ID NO: 145 - DNA, 158 bp, synthetic construct
  misc_feature 1..158: note = Synthetic nucleic acid
  source 1..158: mol_type = other DNA
cagacgacggccagtgtcgacttgtcagaactactctctttcgccctttttctcgcctctaacacttcttgcggcgatggttcctggctcttcgatctcggcatggtggaaattaaagtggtagaacgtgaagggggatcctacggtcattcagccgc

SEQ ID NO: 146 - DNA, 158 bp, synthetic construct
  misc_feature 1..158: note = Synthetic nucleic acid
  source 1..158: mol_type = other DNA
cagacgacggccagtgtcgacatgaatcagaatctgctggtgacaaagcgcgacggtagcacaaacacttcttgcggcgatggttcctggctcttcgatcaggacgatggctgcgaaagcggcgcatgtaagatctcaggatcctacggtcattcagc

SEQ ID NO: 147 - DNA, 158 bp, synthetic construct
  misc_feature 1..158: note = Synthetic nucleic acid
  source 1..158: mol_type = other DNA
cagacgacggccagtgtcgacatggaaaacaatcgcaatttccctgccagacaatttcattcgaacacttcttgcggcgatggttcctggctcttcgatccaagaaccttcttgctcacagccaatatgcatttctcaggatcctacggtcattcagc

SEQ ID NO: 148 - DNA, 158 bp, synthetic construct
  misc_feature 1..158: note = Synthetic nucleic acid
  source 1..158: mol_type = other DNA
cagacgacggccagtgtcgacatgtccgagcttaatgaaaagttagccacagcctgggaaaacacttcttgcggcgatggttcctggctcttcgatcagcaggacgttattactcgtaccttcactcaatctatgctaggatcctacggtcattcagc

SEQ ID NO: 149 - DNA, 158 bp, synthetic construct
  misc_feature 1..158: note = Synthetic nucleic acid
  source 1..158: mol_type = other DNA
cagacgacggccagtgtcgacatgaagaaaaaaattgaatcctaccagggtgctgcaggtggttaacacttcttgcggcgatggttcctggctcttcgatctaaaagtattccggttgaattagaaccatcaaatgccggatcctacggtcattcagc

SEQ ID NO: 150 - DNA, 158 bp, synthetic construct
  misc_feature 1..158: note = Synthetic nucleic acid
  source 1..158: mol_type = other DNA
cagacgacggccagtgtcgacatgagcgagccgttaattgtcggcatccggcatcatagtaacacttcttgcggcgatggttcctggctcttcgatccactggcatcgctgcaaaactggggagttttccatgtcgaaggatcctacggtcattcagc

SEQ ID NO: 151 - DNA, 158 bp, synthetic construct
  misc_feature 1..158: note = Synthetic nucleic acid
  source 1..158: mol_type = other DNA
cagacgacggccagtgtcgacatggatgaccagttaaaacaaagtgcacttgatttccatgaatttccagttaacacttcttgcggcgatggttcctggctcttcgatctggtagaagcgcaaacccaaccgctgctgggatcctacggtcattcagc

SEQ ID NO: 152 - DNA, 158 bp, synthetic construct
  misc_feature 1..158: note = Synthetic nucleic acid
  source 1..158: mol_type = other DNA
cagacgacggccagtgtcgacatgctcaatcaagaactggaactcagtttaaatatggctttcgccagaaacacttcttgcggcgatggttcctggctcttcgatccacaaaagcacaaggcggaagcagcgcatcccggatcctacggtcattcagc

SEQ ID NO: 153 - DNA, 158 bp, synthetic construct
  misc_feature 1..158: note = Synthetic nucleic acid
  source 1..158: mol_type = other DNA
cagacgacggccagtgtcgacatgggaagcccctctctgtattctgcccgtaaaacaaccctaacacttcttgcggcgatggttcctggctcttcgatcgaaacgccaacgctaggggcgctgaagaaagataagttaggatcctacggtcattcagc

SEQ ID NO: 154 - DNA, 158 bp, synthetic construct
  misc_feature 1..158: note = Synthetic nucleic acid
  source 1..158: mol_type = other DNA
cagacgacggccagtgtcgacatgaaagtattaattgttgaaagcgagtttctccatcaagacacctgggtaacacttcttgcggcgatggttcctggctcttcgatcatttaccacgttatgtgcgtgaaagcgaagggatcctacggtcattcagc

SEQ ID NO: 155 - DNA, 158 bp, synthetic construct
  misc_feature 1..158: note = Synthetic nucleic acid
  source 1..158: mol_type = other DNA
cagacgacggccagtgtcgacatgaccaggccagtaacgttatcagaaccccatttcagcaacacttcttgcggcgatggttcctggctcttcgatcccttcaatgggaccgctaccaaacatcaggaggatgaaggatcctacggtcattcagccgc

SEQ ID NO: 156 - DNA, 158 bp, synthetic construct
  misc_feature 1..158: note = Synthetic nucleic acid
  source 1..158: mol_type = other DNA
cagacgacggccagtgtcgacatgaaaataacgacagtcggtgtatgcataattagcggaatttttccgttaacacttcttgcggcgatggttcctggctcttcgatctggtttggcgtgccagtggataacggggcgggatcctacggtcattcagc

SEQ ID NO: 157 - DNA, 158 bp, synthetic construct
  misc_feature 1..158: note = Synthetic nucleic acid
  source 1..158: mol_type = other DNA
cagacgacggccagtgtcgacatgacaatattgaatcacaccctcggtttccctcgcgttggcctgcgtcgaacacttcttgcggcgatggttcctggctcttcgatccaggcggcgcagaacttgcgtcgggggattggatcctacggtcattcagc

SEQ ID NO: 158 - DNA, 158 bp, synthetic construct
  misc_feature 1..158: note = Synthetic nucleic acid
  source 1..158: mol_type = other DNA
cagacgacggccagtgtcgacatgtcgcaacataacgaaaagaacccacatcagcaccaaacacttcttgcggcgatggttcctggctcttcgatcgtgtggtcacgcattcctaagattgacaaaattcctgcccctggatcctacggtcattcagc

SEQ ID NO: 159 - DNA, 158 bp, synthetic construct
  misc_feature 1..158: note = Synthetic nucleic acid
  source 1..158: mol_type = other DNA
cagacgacggccagtgtcgacatgagcgatatggcagagcgccttgcgctacatgaatttacggaaaaaacacttcttgcggcgatggttcctggctcttcgatccgccgtgccagcagcggtgatagcgaagagaggggatcctacggtcattcagc

SEQ ID NO: 160 - DNA, 158 bp, synthetic construct
  misc_feature 1..158: note = Synthetic nucleic acid
  source 1..158: mol_type = other DNA
cagacgacggccagtgtcgacatgcgcgtcgatgccattgctaaggtcaccggaacacttcttgcggcgatggttcctggctcttcgatcacgccaaaacggttatatgaagagttccatctggcaggattgattaaaggatcctacggtcattcagc

SEQ ID NO: 161 - DNA, 158 bp, synthetic construct
  misc_feature 1..158: note = Synthetic nucleic acid
  source 1..158: mol_type = other DNA
cagacgacggccagtgtcgacatggcaaaaaacacatcttgcggtgtccaactgcgtattcgtggcaaaaacacttcttgcggcgatggttcctggctcttcgatcgttggttagcgggtgaagtccagaacggaggaggatcctacggtcattcagc

SEQ ID NO: 162 - DNA, 158 bp, synthetic construct
  misc_feature 1..158: note = Synthetic nucleic acid
  source 1..158: mol_type = other DNA
cagacgacggccagtgtcgacatgctcactcgcctgcgcgaaatagtcgaaaaggtagccagcgcaaacacttcttgcggcgatggttcctggctcttcgatcgcggcatgggcgggctgattcgcggagggttaatgggatcctacggtcattcagc

SEQ ID NO: 163 - DNA, 158 bp, synthetic construct
  misc_feature 1..158: note = Synthetic nucleic acid
  source 1..158: mol_type = other DNA
cagacgacggccagtgtcgacatgaaactgaatgcaacttatataaaaatacgtgataaatggtgggggcttccaacacttcttgcggcgatggttcctggctcttcgatcatcgaacccattcgcgaaagtgcctgcggatcctacggtcattcagc

SEQ ID NO: 164 - DNA, 158 bp, synthetic construct
  misc_feature 1..158: note = Synthetic nucleic acid
  source 1..158: mol_type = other DNA
cagacgacggccagtgtcgacatggcgcgttccaaaactgctcagccaaaacactcactgcaacacttcttgcggcgatggttcctggctcttcgatcagaacgtcaggtcgttgcaaccgcaaccttccgtttctgcggatcctacggtcattcagc

SEQ ID NO: 165 - DNA, 158 bp, synthetic construct
  misc_feature 1..158: note = Synthetic nucleic acid
  source 1..158: mol_type = other DNA
cagacgacggccagtgtcgacatgaacaagaagattcattccctggccttgttggtcaatctgaacacttcttgcggcgatggttcctggctcttcgatcgacgtacgtggtatatgagcgtaaacacccacttcatcggatcctacggtcattcagc

SEQ ID NO: 166 - DNA, 158 bp, synthetic construct
  misc_feature 1..158: note = Synthetic nucleic acid
  source 1..158: mol_type = other DNA
cagacgacggccagtgtcgacgtggactggcttcttgatgtttttgctacctggctctacggaacacttcttgcggcgatggttcctggctcttcgatccaggttgcgcaactggagtccgaaaatgaaggagaagccggatcctacggtcattcagc

SEQ ID NO: 167 - DNA, 158 bp, synthetic construct
  misc_feature 1..158: note = Synthetic nucleic acid
  source 1..158: mol_type = other DNA
cagacgacggccagtgtcgacatggttgcggtaagaagtgcacatatcaataaggctggtgaatttgatccggaaaaataacacttcttgcggcgatggttcctggctcttcgatcgcgtcggttgcacgggagttccggatcctacggtcattcagc

SEQ ID NO: 168 - DNA, 158 bp, synthetic construct
  misc_feature 1..158: note = Synthetic nucleic acid
  source 1..158: mol_type = other DNA
cagacgacggccagtgtcgacatgtacacacagaccctgtatgagttaagtcaggaggctgaaaacacttcttgcggcgatggttcctggctcttcgatcatgatattcaaacacttttcacggcagaacgatatacaggatcctacggtcattcagc

SEQ ID NO: 169 - DNA, 158 bp, synthetic construct
  misc_feature 1..158: note = Synthetic nucleic acid
  source 1..158: mol_type = other DNA
cagacgacggccagtgtcgacatgagctctatctccctgatccaaccggatcgcgacctgttctcctaacacttcttgcggcgatggttcctggctcttcgatcgaagaaacggcctaaagcggcggttggacgtgttggatcctacggtcattcagc

SEQ ID NO: 170 - DNA, 158 bp, synthetic construct
  misc_feature 1..158: note = Synthetic nucleic acid
  source 1..158: mol_type = other DNA
cagacgacggccagtgtcgacatgaaatttgataaacccgcaggggaaaacccgatcgatcagctaacacttcttgcggcgatggttcctggctcttcgatcgataagctgctcgataagctgccggatgtggttcccggatcctacggtcattcagc

SEQ ID NO: 171 - DNA, 158 bp, synthetic construct
  misc_feature 1..158: note = Synthetic nucleic acid
  source 1..158: mol_type = other DNA
cagacgacggccagtgtcgacatgcccgttgcccacgttgccttgcccgttccaacacttcttgcggcgatggttcctggctcttcgatctcccgtaaggtgaaatgggtgctggatgttgatccgattgagggtgaaggatcctacggtcattcagc

SEQ ID NO: 172 - DNA, 158 bp, synthetic construct
  misc_feature 1..158: note = Synthetic nucleic acid
  source 1..158: mol_type = other DNA
cagacgacggccagtgtcgacatgtcaaaattaaaaattgcggttagtgattcttgcccggactgttttaaacacttcttgcggcgatggttcctggctcttcgatcaagcaccctgttgaaaggggaaaaattacggggatcctacggtcattcagc

SEQ ID NO: 173 - DNA, 158 bp, synthetic construct
  misc_feature 1..158: note = Synthetic nucleic acid
  source 1..158: mol_type = other DNA
cagacgacggccagtgtcgacatgacagagatctatgaacaggcgaaacatagcctgcagggtaacacttcttgcggcgatggttcctggctcttcgatctgtttatcaggcgcgcgctcggtattagacgacatacaggatcctacggtcattcagc

SEQ ID NO: 174 - DNA, 158 bp, synthetic construct
  misc_feature 1..158: note = Synthetic nucleic acid
  source 1..158: mol_type = other DNA
cagacgacggccagtgtcgacatgctttacaaaggcgacaccctgtaccttgactggctggaagatggcattaacacttcttgcggcgatggttcctggctcttcgatcgtccggttggcgacctgaaaacggctcctggatcctacggtcattcagc

SEQ ID NO: 175 - DNA, 158 bp, synthetic construct
  misc_feature 1..158: note = Synthetic nucleic acid
  source 1..158: mol_type = other DNA
cagacgacggccagtgtcgacatgctttcaacacaatttaacagggataatcaatatcaagccatcaccaaaccaacacttcttgcggcgatggttcctggctcttcgatcagcattaccggcacgtatcaattcagtggatcctacggtcattcagc

SEQ ID NO: 176 - DNA, 158 bp, synthetic construct
  misc_feature 1..158: note = Synthetic nucleic acid
  source 1..158: mol_type = other DNA
cagacgacggccagtgtcgacatgtccgatcgtatcgatagagacgtgattaacgcgctaattgcaggaacacttcttgcggcgatggttcctggctcttcgatcgccactatctggctggttcgggaggcagaaaagggatcctacggtcattcagc

SEQ ID NO: 177 - DNA, 158 bp, synthetic construct
  misc_feature 1..158: note = Synthetic nucleic acid
  source 1..158: mol_type = other DNA
cagacgacggccagtgtcgacatgacaactaaaaatatgaatacgccaccaggcagcactcaaacacttcttgcggcgatggttcctggctcttcgatctataactattacggttatagttactccgagaaagaggaaggatcctacggtcattcagc

SEQ ID NO: 178 - DNA, 158 bp, synthetic construct
  misc_feature 1..158: note = Synthetic nucleic acid
  source 1..158: mol_type = other DNA
cagacgacggccagtgtcgacatgagcacgtcagacgatatccataacaccacagccactggaacacttcttgcggcgatggttcctggctcttcgatcgtgaaagtgatgaacctcgaccgtttcgacctgctggtcggatcctacggtcattcagc

SEQ ID NO: 179 - DNA, 158 bp, synthetic construct
  misc_feature 1..158: note = Synthetic nucleic acid
  source 1..158: mol_type = other DNA
cagacgacggccagtgtcgacatgagtcaaaccataacccagagccgtttacgcattgaaacacttcttgcggcgatggttcctggctcttcgatcttattacacgcctggcgtttacgcgaaaaagaaagtcatgagggatcctacggtcattcagc

SEQ ID NO: 180 - DNA, 158 bp, synthetic construct
  misc_feature 1..158: note = Synthetic nucleic acid
  source 1..158: mol_type = other DNA
cagacgacggccagtgtcgacatgacagaaaaagtaaaacaacatgccgctccggtaacgaacacttcttgcggcgatggttcctggctcttcgatcatggctattacgaatacgaatataagtcggatgcgaaagagggatcctacggtcattcagc

SEQ ID NO: 181 - DNA, 158 bp, synthetic construct
  misc_feature 1..158: note = Synthetic nucleic acid
  source 1..158: mol_type = other DNA
cagacgacggccagtgtcgacatggacgtttcttacctgctcgacagccttaatgacaaacagcgcgaagcaacacttcttgcggcgatggttcctggctcttcgatcgcggcatacgcccggctggagtcggtggtcggatcctacggtcattcagc

SEQ ID NO: 182 - DNA, 158 bp, synthetic construct
  misc_feature 1..158: note = Synthetic nucleic acid
  source 1..158: mol_type = other DNA
cagacgacggccagtgtcgacatgctttttagcttttttcgaaatttgtgccgtgttttgtatcgcgttaacacttcttgcggcgatggttcctggctcttcgatcgggtagacgaagcggaacaacacgatgagtggggatcctacggtcattcagc

SEQ ID NO: 183 - DNA, 158 bp, synthetic construct
  misc_feature 1..158: note = Synthetic nucleic acid
  source 1..158: mol_type = other DNA
cagacgacggccagtgtcgacatgctaagtcctttgctcaaacgctatacctggaacagcgaacacttcttgcggcgatggttcctggctcttcgatcgattactcaagttccgcaggaaactcctgtttcggcggctggatcctacggtcattcagc

SEQ ID NO: 184 - DNA, 158 bp, synthetic construct
  misc_feature 1..158: note = Synthetic nucleic acid
  source 1..158: mol_type = other DNA
cagacgacggccagtgtcgacatggatactaaaaagatattcaagcacataccctgggtgattctcggaatcataacacttcttgcggcgatggttcctggctcttcgatcggcgtgaagatctcttcgcaccacttgggatcctacggtcattcagc

SEQ ID NO: 185 - DNA, 158 bp, synthetic construct
  misc_feature 1..158: note = Synthetic nucleic acid
  source 1..158: mol_type = other DNA
cagacgacggccagtgtcgacatggcattaaccgccgcgcttaaagcgcaaattgccgcaacacttcttgcggcgatggttcctggctcttcgatcaagaaagaaaaaacgaaatccccacgccgtcggcggcgtggcggatcctacggtcattcagc

SEQ ID NO: 186 - DNA, 158 bp, synthetic construct
  misc_feature 1..158: note = Synthetic nucleic acid
  source 1..158: mol_type = other DNA
cagacgacggccagtgtcgacatgaaaaaagtcgtcacggtttgcccctattgcgcatcaggttgcaaaatcaacaacacttcttgcggcgatggttcctggctcttcgatcgcctgcgcgaagcggcactggcggatggatcctacggtcattcagc

SEQ ID NO: 187 - DNA, 158 bp, synthetic construct
  misc_feature 1..158: note = Synthetic nucleic acid
  source 1..158: mol_type = other DNA
cagacgacggccagtgtcgacatggaaatgacatcagcgtttacccttaatgttcgtctggacaaaacacttcttgcggcgatggttcctggctcttcgatcagtttttggaaaacaactgcaactgacctgcaagaaggatcctacggtcattcagc

SEQ ID NO: 188 - DNA, 158 bp, synthetic construct
  misc_feature 1..158: note = Synthetic nucleic acid
  source 1..158: mol_type = other DNA
cagacgacggccagtgtcgacatgtctaacgtgcaggagtggcaacagcttgccaacaaaacacttcttgcggcgatggttcctggctcttcgatcgtgcgcgacgtactgaatctgataagccagcatcatgatgtaggatcctacggtcattcagc

SEQ ID NO: 189 - DNA, 158 bp, synthetic construct
  misc_feature 1..158: note = Synthetic nucleic acid
  source 1..158: mol_type = other DNA
cagacgacggccagtgtcgacgtgtcccgtattattatgctgatccctaccggaaccagcgtcggtaacacttcttgcggcgatggttcctggctcttcgatccgctgactgcgattcagtctgcacagcagcagtgcggatcctacggtcattcagc

SEQ ID NO: 190 - DNA, 158 bp, synthetic construct
  misc_feature 1..158: note = Synthetic nucleic acid
  source 1..158: mol_type = other DNA
cagacgacggccagtgtcgacttggcaacgacaaccgcagaatgcctgacgcaggaaaaacacttcttgcggcgatggttcctggctcttcgatcggaaggcactgaaattgaaggctgcgtctcctgtgcacttcacggatcctacggtcattcagc

SEQ ID NO: 191 - DNA, 158 bp, synthetic construct
  misc_feature 1..158: note = Synthetic nucleic acid
  source 1..158: mol_type = other DNA
cagacgacggccagtgtcgacatgaacatcattgccattatgggaccgcatggcgtcttttataaaaacacttcttgcggcgatggttcctggctcttcgatctttaccgcgtacgagtcctaaaaatggcgggattaggatcctacggtcattcagc

SEQ ID NO: 192 - DNA, 158 bp, synthetic construct
  misc_feature 1..158: note = Synthetic nucleic acid
  source 1..158: mol_type = other DNA
cagacgacggccagtgtcgacatgacaccgcatgtgatgaaacgagacggctgcaaagtgcaacacttcttgcggcgatggttcctggctcttcgatcgcgccgcgttaaacatttggggaatgggcagataggtcagggatcctacggtcattcagc

SEQ ID NO: 193 - DNA, 158 bp, synthetic construct
  misc_feature 1..158: note = Synthetic nucleic acid
  source 1..158: mol_type = other DNA
cagacgacggccagtgtcgacatgaaatcaatgaatattgccgccagtagtgaactggtatcccgaaacacttcttgcggcgatggttcctggctcttcgatcgcgtgaaacggttgtacggttatgtgttgaaggagggatcctacggtcattcagc

SEQ ID NO: 194 - DNA, 158 bp, synthetic construct
  misc_feature 1..158: note = Synthetic nucleic acid
  source 1..158: mol_type = other DNA
cagacgacggccagtgtcgacatgagcaccattgtgatttttttagctgctttgctggcctgaacacttcttgcggcgatggttcctggctcttcgatcccgcaactgatcaccccttcagaaagccttatcgaattgggatcctacggtcattcagc

SEQ ID NO: 195 - DNA, 158 bp, synthetic construct
  misc_feature 1..158: note = Synthetic nucleic acid
  source 1..158: mol_type = other DNA
cagacgacggccagtgtcgacttgcttaatccgatcgttcgtaaattccagtacggccaacacaccgtgaaacacttcttgcggcgatggttcctggctcttcgatcggaagctccggctgctgaacagggcgaggggggatcctacggtcattcagc

SEQ ID NO: 196 - DNA, 158 bp, synthetic construct
  misc_feature 1..158: note = Synthetic nucleic acid
  source 1..158: mol_type = other DNA
cagacgacggccagtgtcgacatggctcgtacaacacccatcgcacgctaccgtaacataacacttcttgcggcgatggttcctggctcttcgatcagtaacgttgctcaggccgtaattgaagcccgtggtaaaaggggatcctacggtcattcagc

SEQ ID NO: 197 - DNA, 158 bp, synthetic construct
  misc_feature 1..158: note = Synthetic nucleic acid
  source 1..158: mol_type = other DNA
cagacgacggccagtgtcgacatgaattctctgtttgccagtacggcccgtgggctggaagagaacacttcttgcggcgatggttcctggctcttcgatcgccagatccacaactgctggctgattaccgcagccgagggatcctacggtcattcagc

SEQ ID NO: 198 - DNA, 158 bp, synthetic construct
  misc_feature 1..158: note = Synthetic nucleic acid
  source 1..158: mol_type = other DNA
cagacgacggccagtgtcgacttgtatctgtttgaaagcctgaatcaactgattcaaacctacctgccaacacttcttgcggcgatggttcctggctcttcgatcgacgtgattaaagtcacccgaaaccgaaatactggatcctacggtcattcagc

SEQ ID NO: 199 - DNA, 158 bp, synthetic construct
  misc_feature 1..158: note = Synthetic nucleic acid
  source 1..158: mol_type = other DNA
cagacgacggccagtgtcgacatgaacaaatcagggaaatacctcgtctggacagtgctctctgtaatgggaaacacttcttgcggcgatggttcctggctcttcgatctcgtggcgcaggcaaaaggcgcacacactggatcctacggtcattcagc

SEQ ID NO: 200 - DNA, 158 bp, synthetic construct
  misc_feature 1..158: note = Synthetic nucleic acid
  source 1..158: mol_type = other DNA
cagacgacggccagtgtcgacatgaagattttttccgtccgacagaccgttttgcccaacacttcttgcggcgatggttcctggctcttcgatcgaaattatggtgtcggcatgaatattgcgtggagatttgagactggatcctacggtcattcagc

SEQ ID NO: 201 - DNA, 158 bp, synthetic construct
  misc_feature 1..158: note = Synthetic nucleic acid
  source 1..158: mol_type = other DNA
cagacgacggccagtgtcgacatggctaacggttggacaggtaatatattaagagtcaatctcacgacaaacacttcttgcggcgatggttcctggctcttcgatcatctggcagcacacaatctactgcctgcgaccggatcctacggtcattcagc

SEQ ID NO: 202 - DNA, 158 bp, synthetic construct
  misc_feature 1..158: note = Synthetic nucleic acid
  source 1..158: mol_type = other DNA
cagacgacggccagtgtcgacttgtttcccccgatgtggcgcagactgatttatcaccccgatatcaaaacacttcttgcggcgatggttcctggctcttcgatcctgagtcgcaagttgcgggattcgaaggcgattggatcctacggtcattcagc

SEQ ID NO: 203 - DNA, 158 bp, synthetic construct
  misc_feature 1..158: note = Synthetic nucleic acid
  source 1..158: mol_type = other DNA
cagacgacggccagtgtcgacatgaaaaaaagacatctgcttagcttactggcgctgggcattagcaaacacttcttgcggcgatggttcctggctcttcgatccatgaccagcgaccgtagcgtcaatttccgcttcggatcctacggtcattcagc

SEQ ID NO: 204 - DNA, 158 bp, synthetic construct
  misc_feature 1..158: note = Synthetic nucleic acid
  source 1..158: mol_type = other DNA
cagacgacggccagtgtcgacatgaagaagaattcttatcttttaagctgcctggccattgccgtctaacacttcttgcggcgatggttcctggctcttcgatcgacggcagagcgagaagtaccggttggacaagcgggatcctacggtcattcagc

SEQ ID NO: 205 - DNA, 158 bp, synthetic construct
  misc_feature 1..158: note = Synthetic nucleic acid
  source 1..158: mol_type = other DNA
cagacgacggccagtgtcgacatggaaagcaaacgtctggataatgccgcgctggcggcaacacttcttgcggcgatggttcctggctcttcgatcgatttggacagacggcgcagagctgcagcgaagaagaaggttggatcctacggtcattcagc

SEQ ID NO: 206 - DNA, 158 bp, synthetic construct
  misc_feature 1..158: note = Synthetic nucleic acid
  source 1..158: mol_type = other DNA
cagacgacggccagtgtcgacatgaaaggtcgcctgttagatgctgtcccactcagttccctaaaacacttcttgcggcgatggttcctggctcttcgatcctggatgccggagacggaacgttactcgaatgcgatgggatcctacggtcattcagc

SEQ ID NO: 207 - DNA, 158 bp, synthetic construct
  misc_feature 1..158: note = Synthetic nucleic acid
  source 1..158: mol_type = other DNA
cagacgacggccagtgtcgacatgagtaatctggccgcgatgctgcgcctgcccaacacttcttgcggcgatggttcctggctcttcgatcctgataaccgacatatccgcatgacggcgacaattggcggcaaagacggatcctacggtcattcagc

SEQ ID NO: 208 - DNA, 158 bp, synthetic construct
  misc_feature 1..158: note = Synthetic nucleic acid
  source 1..158: mol_type = other DNA
cagacgacggccagtgtcgacatgtcatatacaccgatgagtgatctcggacaacaagggttaacacttcttgcggcgatggttcctggctcttcgatcatgaagcggctgggaattgataaatcggcattgattcccggatcctacggtcattcagc

SEQ ID NO: 209 - DNA, 158 bp, synthetic construct
  misc_feature 1..158: note = Synthetic nucleic acid
  source 1..158: mol_type = other DNA
cagacgacggccagtgtcgacatgggtcaggaaaagctatacatcgaaaaagagctcagttggttatcaacacttcttgcggcgatggttcctggctcttcgatcgactacatcaaatcactcgaacaacctgaaagaggatcctacggtcattcagc

SEQ ID NO: 210 - DNA, 158 bp, synthetic construct
  misc_feature 1..158: note = Synthetic nucleic acid
  source 1..158: mol_type = other DNA
cagacgacggccagtgtcgacatgagcaaggcaggcaaaataaccgctgcgatttcaaacacttcttgcggcgatggttcctggctcttcgatcaggctaatcagtgtcggacgattttgtcgcagatgaagaagctaggatcctacggtcattcagc

SEQ ID NO: 211 - DNA, 158 bp, synthetic construct
  misc_feature 1..158: note = Synthetic nucleic acid
  source 1..158: mol_type = other DNA
cagacgacggccagtgtcgacatgctaccaaaagccgcccgcattccccacgccatgacgcttaacacttcttgcggcgatggttcctggctcttcgatctggcgcagggaacattacccgctacgcctgcggaccaaggatcctacggtcattcagc

SEQ ID NO: 212 - DNA, 158 bp, synthetic construct
  misc_feature 1..158: note = Synthetic nucleic acid
  source 1..158: mol_type = other DNA
cagacgacggccagtgtcgacatggaactgaaagcgacaacgcttggaaaacgtctggcaaacacttcttgcggcgatggttcctggctcttcgatctactgaaaaatctggatgtgccggtggcgagaaaaccggacggatcctacggtcattcagc

SEQ ID NO: 213 - DNA, 158 bp, synthetic construct
  misc_feature 1..158: note = Synthetic nucleic acid
  source 1..158: mol_type = other DNA
cagacgacggccagtgtcgacatgagcgcgctcaactccctgccattaccggtggtcaggctgctaacacttcttgcggcgatggttcctggctcttcgatccccgccacggaacaggcacaaggagccacgcaatccggatcctacggtcattcagc

SEQ ID NO: 214 - DNA, 158 bp, synthetic construct
  misc_feature 1..158: note = Synthetic nucleic acid
  source 1..158: mol_type = other DNA
cagacgacggccagtgtcgacatgaacatgttttttaggcttaccgcgttagctggcctgcttgcaatagcaaacacttcttgcggcgatggttcctggctcttcgatcccgcggaacaacccgctcccgtcaagtggggatcctacggtcattcagc

SEQ ID NO: 215 - DNA, 158 bp, synthetic construct
  misc_feature 1..158: note = Synthetic nucleic acid
  source 1..158: mol_type = other DNA
cagacgacggccagtgtcgacatgagtcgtaaacaactggcgctattcgaaccaacacttgtaacacttcttgcggcgatggttcctggctcttcgatcgtcattgatttactgctgaccgtttgcggtctggtggaaggatcctacggtcattcagc

SEQ ID NO: 216 - DNA, 158 bp, synthetic construct
  misc_feature 1..158: note = Synthetic nucleic acid
  source 1..158: mol_type = other DNA
cagacgacggccagtgtcgacatgacaacaatgaatcctttccttgtgcaaagcacactgcaacacttcttgcggcgatggttcctggctcttcgatcgattatgccgatgctgcaacatcgtggcttgaacataggcggatcctacggtcattcagc

SEQ ID NO: 217 - DNA, 158 bp, synthetic construct
  misc_feature 1..158: note = Synthetic nucleic acid
  source 1..158: mol_type = other DNA
cagacgacggccagtgtcgacatgcagcagttagccagtttcttatccggtacctggcagtctggaacacttcttgcggcgatggttcctggctcttcgatcctggtggccaggcagcacggtgattttgtcgattacggatcctacggtcattcagc

SEQ ID NO: 218 - DNA, 158 bp, synthetic construct
  misc_feature 1..158: note = Synthetic nucleic acid
  source 1..158: mol_type = other DNA
cagacgacggccagtgtcgacatgacgaatccgttactgactccctttgaattgcctccgttttctaaaattaacacttcttgcggcgatggttcctggctcttcgatctgctggagcattacggcattaagggctcgggatcctacggtcattcagc

SEQ ID NO: 219 - DNA, 158 bp, synthetic construct
  misc_feature 1..158: note = Synthetic nucleic acid
  source 1..158: mol_type = other DNA
cagacgacggccagtgtcgacatggatacgccacgtccacagttattagattttcaatttcatcagaataacgaaacacttcttgcggcgatggttcctggctcttcgatcctgttcgcgtcgttaaaaagcatcgtcggatcctacggtcattcagc

SEQ ID NO: 220 - DNA, 158 bp, synthetic construct
  misc_feature 1..158: note = Synthetic nucleic acid
  source 1..158: mol_type = other DNA
cagacgacggccagtgtcgacatggtaccctcaacattttctcgtttgaaagccgcgcgttaacacttcttgcggcgatggttcctggctcttcgatcgctacagtaccaacaaggtcaggtagtccccgtcagtataggatcctacggtcattcagc

SEQ ID NO: 221 - DNA, 158 bp, synthetic construct
  misc_feature 1..158: note = Synthetic nucleic acid
  source 1..158: mol_type = other DNA
cagacgacggccagtgtcgacatgacagacctttcacacagcagggaaaaggacaaaatcaatccggtggtaacacttcttgcggcgatggttcctggctcttcgatcggccatagcgtgatgttcccggacgcgggaggatcctacggtcattcagc

SEQ ID NO: 222 - DNA, 158 bp, synthetic construct
  misc_feature 1..158: note = Synthetic nucleic acid
  source 1..158: mol_type = other DNA
cagacgacggccagtgtcgacatgactcaagtcgcgaagaaaattctggtgacgtgcgcactgaacacttcttgcggcgatggttcctggctcttcgatccggatgccggtgctaaaccgggtcatcaggtgaaattgggatcctacggtcattcagc

SEQ ID NO: 223 - DNA, 158 bp, synthetic construct
  misc_feature 1..158: note = Synthetic nucleic acid
  source 1..158: mol_type = other DNA
cagacgacggccagtgtcgacatgaaactcgccgcctgttttctgacactccttcctggcttaacacttcttgcggcgatggttcctggctcttcgatcgacgataaagtgctggtcgtctgggcagggcaacagtttggatcctacggtcattcagc

SEQ ID NO: 224 - DNA, 158 bp, synthetic construct
  misc_feature 1..158: note = Synthetic nucleic acid
  source 1..158: mol_type = other DNA
cagacgacggccagtgtcgacatgagtaaaccgttcaaactgaattccgcttttaaaccttctggcgatcaaacacttcttgcggcgatggttcctggctcttcgatcctgcgtgagctgtttatcgcggcatcggggggatcctacggtcattcagc

SEQ ID NO: 225 - DNA, 158 bp, synthetic construct
  misc_feature 1..158: note = Synthetic nucleic acid
  source 1..158: mol_type = other DNA
cagacgacggccagtgtcgacatgcgtctaaaccccggccaacaacaagctgtcgaattcaacacttcttgcggcgatggttcctggctcttcgatccgaatctgaaagcgatgatggcggcaaaacgagggaaagagggatcctacggtcattcagc

SEQ ID NO: 226 - DNA, 158 bp, synthetic construct
  misc_feature 1..158: note = Synthetic nucleic acid
  source 1..158: mol_type = other DNA
cagacgacggccagtgtcgacatgagctacccgtcgctgttcgccccgctggatttaggttttaaacacttcttgcggcgatggttcctggctcttcgatcaattgcccagggaacacggctggcgctggagattatcggatcctacggtcattcagc

SEQ ID NO: 227 - DNA, 158 bp, synthetic construct
  misc_feature 1..158: note = Synthetic nucleic acid
  source 1..158: mol_type = other DNA
cagacgacggccagtgtcgacatggatgccctgcaattattaacctggtcgctgattctctatctgtttaacacttcttgcggcgatggttcctggctcttcgatctggttgtgctgctaatcgctattgccgtcacgggatcctacggtcattcagc

SEQ ID NO: 228 - DNA, 158 bp, synthetic construct
  misc_feature 1..158: note = Synthetic nucleic acid
  source 1..158: mol_type = other DNA
cagacgacggccagtgtcgacatggaatcaatcgaacaacaactgacagaactgcgaacgacgcttaacacttcttgcggcgatggttcctggctcttcgatcacgaagcggaaatgctgcgtttgctgggtagctcgggatcctacggtcattcagc

SEQ ID NO: 229 - DNA, 158 bp, synthetic construct
  misc_feature 1..158: note = Synthetic nucleic acid
  source 1..158: mol_type = other DNA
cagacgacggccagtgtcgacatggctgaactgactgcgcttcacacattaacagcgcaaataacacttcttgcggcgatggttcctggctcttcgatcctgcgcgatcgcataacgcaatggcaattatttcacgcgggatcctacggtcattcagc

SEQ ID NO: 230 - DNA, 158 bp, synthetic construct
  misc_feature 1..158: note = Synthetic nucleic acid
  source 1..158: mol_type = other DNA
cagacgacggccagtgtcgacatgaacgcatcgtcatggtccttgcgcaatttgccctggttcagaacacttcttgcggcgatggttcctggctcttcgatcgagcaagcaccaccgcaaggtacgctggcctctgtaggatcctacggtcattcagc

SEQ ID NO: 231 - DNA, 158 bp, synthetic construct
  misc_feature 1..158: note = Synthetic nucleic acid
  source 1..158: mol_type = other DNA
cagacgacggccagtgtcgacatggctatgtcagacgaggcgatgtttgccccgccacaaggaataaaacacttcttgcggcgatggttcctggctcttcgatcgcggctggggatctcggttcgcgaggtgttgcaaggatcctacggtcattcagc

SEQ ID NO: 232 - DNA, 158 bp, synthetic construct
  misc_feature 1..158: note = Synthetic nucleic acid
  source 1..158: mol_type = other DNA
cagacgacggccagtgtcgacgtgaaacactactccatacaacctgccaacctcgaatttaatgctaacacttcttgcggcgatggttcctggctcttcgatcaattgttgaagggtaaagcggttaaggcgggggtgggatcctacggtcattcagc

SEQ ID NO: 233 - DNA, 158 bp, synthetic construct
  misc_feature 1..158: note = Synthetic nucleic acid
  source 1..158: mol_type = other DNA
cagacgacggccagtgtcgacatgtcccgaaaagaccttgccaatgcgattcgcgcactcaaacacttcttgcggcgatggttcctggctcttcgatcggcaaaagcgcataaggtgctgggagtgaaaggtgccaacggatcctacggtcattcagc

SEQ ID NO: 234 - DNA, 158 bp, synthetic construct
  misc_feature 1..158: note = Synthetic nucleic acid
  source 1..158: mol_type = other DNA
cagacgacggccagtgtcgacatgtcctcacgtaaagagcttgccaatgctattcgtgcaacacttcttgcggcgatggttcctggctcttcgatcactgttgataacgttgttgcgaaagcaaaagaactgctggttggatcctacggtcattcagc

SEQ ID NO: 235 - DNA, 158 bp, synthetic construct
  misc_feature 1..158: note = Synthetic nucleic acid
  source 1..158: mol_type = other DNA
cagacgacggccagtgtcgacatgttcggaaaattatcacttgatgcagtcccgttccatgaaaacacttcttgcggcgatggttcctggctcttcgatcatgagattactaaggcagggctgaaaaatggcaacgttggatcctacggtcattcagc

SEQ ID NO: 236 - DNA, 158 bp, synthetic construct
  misc_feature 1..158: note = Synthetic nucleic acid
  source 1..158: mol_type = other DNA
cagacgacggccagtgtcgacatgtttaggttgaaccctttcgtacgggtcgggctaacacttcttgcggcgatggttcctggctcttcgatcgaagacggacgtcgttactttatggcagtggattatcgcttcattggatcctacggtcattcagc

SEQ ID NO: 237 - DNA, 158 bp, synthetic construct
  misc_feature 1..158: note = Synthetic nucleic acid
  source 1..158: mol_type = other DNA
cagacgacggccagtgtcgacttgcgcgtaagtcgctcgttaacaatcaagcagataacacttcttgcggcgatggttcctggctcttcgatcctccctattgaaatcttcgaagagagttacctggaagaaaagtacggatcctacggtcattcagc

SEQ ID NO: 238 - DNA, 158 bp, synthetic construct
  misc_feature 1..158: note = Synthetic nucleic acid
  source 1..158: mol_type = other DNA
cagacgacggccagtgtcgacatgaaaaccgttagggagtccacaacgttgtacaactttctcggataacacttcttgcggcgatggttcctggctcttcgatcacgctggtataaacgctatctgaagcgcgcaggaggatcctacggtcattcagc

SEQ ID NO: 239 - DNA, 158 bp, synthetic construct
  misc_feature 1..158: note = Synthetic nucleic acid
  source 1..158: mol_type = other DNA
cagacgacggccagtgtcgacatgaataactctcggttattccgtttgagcaggattgttattgcgttaaaacacttcttgcggcgatggttcctggctcttcgatctttgtgggtgaatatcgtaaccccaaatgtcggatcctacggtcattcagc

SEQ ID NO: 240 - DNA, 158 bp, synthetic construct
  misc_feature 1..158: note = Synthetic nucleic acid
  source 1..158: mol_type = other DNA
cagacgacggccagtgtcgacatgaaaaccgtcgtttttgcctaccacgatatgggatgcctaacacttcttgcggcgatggttcctggctcttcgatcttcctgcgcaccgttgatcttacggataaaccatcaacaggatcctacggtcattcagc

SEQ ID NO: 241 - DNA, 158 bp, synthetic construct
  misc_feature 1..158: note = Synthetic nucleic acid
  source 1..158: mol_type = other DNA
cagacgacggccagtgtcgacgtgagtaaacgaattgcgcttttcccggcgttattgctaacacttcttgcggcgatggttcctggctcttcgatcgcgccatattttatctatttgttgagaaagcagagccgtcatggatcctacggtcattcagc

SEQ ID NO: 242 - DNA, 158 bp, synthetic construct
  misc_feature 1..158: note = Synthetic nucleic acid
  source 1..158: mol_type = other DNA
cagacgacggccagtgtcgacatgaatcgttttattatggccaacagtcagcaatgtctgggttaacacttcttgcggcgatggttcctggctcttcgatctgactggctgggggtaaaatcagtcaaatctcacgcgggatcctacggtcattcagc

SEQ ID NO: 243 - DNA, 158 bp, synthetic construct
  misc_feature 1..158: note = Synthetic nucleic acid
  source 1..158: mol_type = other DNA
cagacgacggccagtgtcgacatggtattgttttatcgggcacactggcgcgactataaaaacgataacacttcttgcggcgatggttcctggctcttcgatcatggcaactatctgactgatggcgtaatgccacatggatcctacggtcattcagc

SEQ ID NO: 244 - DNA, 158 bp, synthetic construct
  misc_feature 1..158: note = Synthetic nucleic acid
  source 1..158: mol_type = other DNA
cagacgacggccagtgtcgacatgtctgacgacatgtctatgggtttgccttcgtcaaacacttcttgcggcgatggttcctggctcttcgatctcgaggcaggtttgtacggttatacttatcttgaagatgagggtggatcctacggtcattcagc

SEQ ID NO: 245 - DNA, 158 bp, synthetic construct
  misc_feature 1..158: note = Synthetic nucleic acid
  source 1..158: mol_type = other DNA
cagacgacggccagtgtcgacatgacacaactcgccattggcaaacccgctcccctcgaacacttcttgcggcgatggttcctggctcttcgatcctggcagggacctgcacacggattgtgtgtgttccagagatgtggatcctacggtcattcagc

SEQ ID NO: 246 - DNA, 158 bp, synthetic construct
  misc_feature 1..158: note = Synthetic nucleic acid
  source 1..158: mol_type = other DNA
cagacgacggccagtgtcgacatgaccattgagaaaattttcaccccgcaggacgacgaacacttcttgcggcgatggttcctggctcttcgatctatcgaggtaattaacgccggtaaaaaagcgctcggaattagtggatcctacggtcattcagc

SEQ ID NO: 247 - DNA, 158 bp, synthetic construct
  misc_feature 1..158: note = Synthetic nucleic acid
  source 1..158: mol_type = other DNA
cagacgacggccagtgtcgacatgggtattttctccattgctaaccaacatattcgctttgcggtaaaaaacacttcttgcggcgatggttcctggctcttcgatcataagtatcaacatgcgttgaccgatagtcatggatcctacggtcattcagc

SEQ ID NO: 248 - DNA, 158 bp, synthetic construct
  misc_feature 1..158: note = Synthetic nucleic acid
  source 1..158: mol_type = other DNA
cagacgacggccagtgtcgacatgtctgttcgcaatatttttgctgacgagagccacgatatttacaaacacttcttgcggcgatggttcctggctcttcgatccgcggctttgcgcgattttatgaataaaaaccggggatcctacggtcattcagc

SEQ ID NO: 249 - DNA, 158 bp, synthetic construct
  misc_feature 1..158: note = Synthetic nucleic acid
  source 1..158: mol_type = other DNA
cagacgacggccagtgtcgacgtgagcatggatataagcgatttttatcagacattttttgatgaagcggacgaaaacacttcttgcggcgatggttcctggctcttcgatcaacgtatggcgaacaccgccgccctgggatcctacggtcattcagc

SEQ ID NO: 250 - DNA, 158 bp, synthetic construct
  misc_feature 1..158: note = Synthetic nucleic acid
  source 1..158: mol_type = other DNA
cagacgacggccagtgtcgacatgcggttgtttattgccgaaaaaccgagtctggcgcgcgccattaacacttcttgcggcgatggttcctggctcttcgatccagcagatgaagtcggaagcggggcgatagcgtggggatcctacggtcattcagc

SEQ ID NO: 251 - DNA, 158 bp, synthetic construct
  misc_feature 1..158: note = Synthetic nucleic acid
  source 1..158: mol_type = other DNA
cagacgacggccagtgtcgacgtgaccgtatcttctcatcgacttgaactgttaagcccggcaaacacttcttgcggcgatggttcctggctcttcgatcatgagctgctgaaaacattgccgaagcgaaaagggggatcctacggtcattcagccgc

SEQ ID NO: 252 - DNA, 158 bp, synthetic construct
  misc_feature 1..158: note = Synthetic nucleic acid
  source 1..158: mol_type = other DNA
cagacgacggccagtgtcgacatgagccaaattcacaaacacaccattcctgccaacatcgcaaacacttcttgcggcgatggttcctggctcttcgatctgcttgaagagaagcaggctatcgcgatgccatcgtatggatcctacggtcattcagc

SEQ ID NO: 253 - DNA, 158 bp, synthetic construct
  misc_feature 1..158: note = Synthetic nucleic acid
  source 1..158: mol_type = other DNA
cagacgacggccagtgtcgacatgaaaggactcaataaaatcacctgctgcttgctggcagcactactcatgcaacacttcttgcggcgatggttcctggctcttcgatctcacgcccctgcgccatcgtcacgggccggatcctacggtcattcagc

SEQ ID NO: 254 - DNA, 158 bp, synthetic construct
  misc_feature 1..158: note = Synthetic nucleic acid
  source 1..158: mol_type = other DNA
cagacgacggccagtgtcgacatgaaaacaaatataaaagtatttacatcgacaggtgaattgaccactcttggccgtaacacttcttgcggcgatggttcctggctcttcgatcaggcagatttaagccgctgccgaggatcctacggtcattcagc

SEQ ID NO: 255 - DNA, 158 bp, synthetic construct
  misc_feature 1..158: note = Synthetic nucleic acid
  source 1..158: mol_type = other DNA
cagacgacggccagtgtcgacatgaatattttaggttttttccagcgactcggtagggcgttacaaacacttcttgcggcgatggttcctggctcttcgatcgcgggtcaaacaccgctgtatgaaatcaaaaaggtaggatcctacggtcattcagc

SEQ ID NO: 256 - DNA, 158 bp, synthetic construct
  misc_feature 1..158: note = Synthetic nucleic acid
  source 1..158: mol_type = other DNA
cagacgacggccagtgtcgacatgatgccagaaattggtaacggactgctgtgcctggcgctggaacacttcttgcggcgatggttcctggctcttcgatccgtgagtccgcaaaaaactgcgccggaggccgtaggaggatcctacggtcattcagc

SEQ ID NO: 257 - DNA, 158 bp, synthetic construct
  misc_feature 1..158: note = Synthetic nucleic acid
  source 1..158: mol_type = other DNA
cagacgacggccagtgtcgacatgattaagtttagcgcaacgctcctggccacgaacacttcttgcggcgatggttcctggctcttcgatcccgatgatatcgggtttgcgatttatcaggtggatttgagtaagctgggatcctacggtcattcagc

SEQ ID NO: 258 - DNA, 158 bp, synthetic construct
  misc_feature 1..158: note = Synthetic nucleic acid
  source 1..158: mol_type = other DNA
cagacgacggccagtgtcgacatgagattaacgacgaaattttcggcctttgttacgctgctaacacttcttgcggcgatggttcctggctcttcgatcactaacgtgaaaaaatattcacaaagatactcggttcaaggatcctacggtcattcagc

SEQ ID NO: 259 - DNA, 158 bp, synthetic construct
  misc_feature 1..158: note = Synthetic nucleic acid
  source 1..158: mol_type = other DNA
cagacgacggccagtgtcgacgtggaaaaagccaaacaagttacctggcggctgttggctgcaacacttcttgcggcgatggttcctggctcttcgatcacgttgatgagcgccacggaatggggacgtcgttacctaggatcctacggtcattcagc

SEQ ID NO: 260 - DNA, 158 bp, synthetic construct
  misc_feature 1..158: note = Synthetic nucleic acid
  source 1..158: mol_type = other DNA
cagacgacggccagtgtcgacatgaatatattcgatcactatcgccagcgatatgaagctgccaaaacacttcttgcggcgatggttcctggctcttcgatctgcgaatggtatttgcgcgtacgtaaatcgtctataggatcctacggtcattcagc

SEQ ID NO: 261 - DNA, 158 bp, synthetic construct
  misc_feature 1..158: note = Synthetic nucleic acid
  source 1..158: mol_type = other DNA
cagacgacggccagtgtcgacatggcgaaaaacctaatactctggctggtcattgccgttgtaacacttcttgcggcgatggttcctggctcttcgatcccgggtaacaccatgtcagagcagttaggcgacaaggttggatcctacggtcattcagc

SEQ ID NO: 262 - DNA, 158 bp, synthetic construct
  misc_feature 1..158: note = Synthetic nucleic acid
  source 1..158: mol_type = other DNA
cagacgacggccagtgtcgacatgtttcaggacaacccgctgctagcgcagcttaaacagcaactgcattaacacttcttgcggcgatggttcctggctcttcgatcccgcagcattattgcgcgcccggtcgcgtccggatcctacggtcattcagc

SEQ ID NO: 263 - DNA, 158 bp, synthetic construct
  misc_feature 1..158: note = Synthetic nucleic acid
  source 1..158: mol_type = other DNA
cagacgacggccagtgtcgacatgagttatcaggtcttagcccgaaaatggcgcccacaaacaacacttcttgcggcgatggttcctggctcttcgatcgatgcggagctggatgaagaaagtatccgccccattccgggatcctacggtcattcagc

SEQ ID NO: 264 - DNA, 158 bp, synthetic construct
  misc_feature 1..158: note = Synthetic nucleic acid
  source 1..158: mol_type = other DNA
cagacgacggccagtgtcgacatgcctgttataactcttcctgatggcagccaacgccattaaacacttcttgcggcgatggttcctggctcttcgatcgagattcgcagccgcagtcttaaacaattggaggaacttggatcctacggtcattcagc

SEQ ID NO: 265 - DNA, 158 bp, synthetic construct
  misc_feature 1..158: note = Synthetic nucleic acid
  source 1..158: mol_type = other DNA
cagacgacggccagtgtcgacatgaataagtttattgctgctgaagctgcggaatgtataggctgtaacacttcttgcggcgatggttcctggctcttcgatcatatgttaactctgtttgatacgaaggcatcgataggatcctacggtcattcagc

SEQ ID NO: 266 - DNA, 158 bp, synthetic construct
  misc_feature 1..158: note = Synthetic nucleic acid
  source 1..158: mol_type = other DNA
cagacgacggccagtgtcgacatgagtggcgcttttaacaacgatggtcggggcatatctcccttaattaacacttcttgcggcgatggttcctggctcttcgatcttgatgcagggcagtttaagcgccgggtacggggatcctacggtcattcagc

SEQ ID NO: 267 - DNA, 158 bp, synthetic construct
  misc_feature 1..158: note = Synthetic nucleic acid
  source 1..158: mol_type = other DNA
cagacgacggccagtgtcgacatgattgttttctcctcgttacaaattcgtcgcggcgtgcgcaacacttcttgcggcgatggttcctggctcttcgatcagcttgagcagatgctgctggaaggccaaagcaacgggggatcctacggtcattcagc

SEQ ID NO: 268 - DNA, 158 bp, synthetic construct
  misc_feature 1..158: note = Synthetic nucleic acid
  source 1..158: mol_type = other DNA
cagacgacggccagtgtcgacatgtcatccgatattaagatcaaagtgcaaagctttggtcgtttcctaacacttcttgcggcgatggttcctggctcttcgatcgaagtgctggaactgctggcaggtcgtaagggatcctacggtcattcagccgc

SEQ ID NO: 269 - DNA, 158 bp, synthetic construct
  misc_feature 1..158: note = Synthetic nucleic acid
  source 1..158: mol_type = other DNA
cagacgacggccagtgtcgacgtgacggacgattttgcaccagacggtcagctggcgaaaaacacttcttgcggcgatggttcctggctcttcgatccccgtgcggttcgtttccttgcgataccatcctccaggtctggatcctacggtcattcagc

SEQ ID NO: 270 - DNA, 158 bp, synthetic construct
  misc_feature 1..158: note = Synthetic nucleic acid
  source 1..158: mol_type = other DNA
cagacgacggccagtgtcgacatgtcattaatcagtatgcatggcgcatggctgtcgttaacacttcttgcggcgatggttcctggctcttcgatcgaacgctgggagtatcttgaagcgttaaaaaatggtggcgatggatcctacggtcattcagc

SEQ ID NO: 271 - DNA, 158 bp, synthetic construct
  misc_feature 1..158: note = Synthetic nucleic acid
  source 1..158: mol_type = other DNA
cagacgacggccagtgtcgacatgaaactacagaactcttttcgcgactatacggcagagtccgcgctgtttaacacttcttgcggcgatggttcctggctcttcgatccagcggttgccgcagcggaggaccatgctggatcctacggtcattcagc

SEQ ID NO: 272 - DNA, 158 bp, synthetic construct
  misc_feature 1..158: note = Synthetic nucleic acid
  source 1..158: mol_type = other DNA
cagacgacggccagtgtcgacatggcagggaagtttcgctgcattttgctgttgatagcagggctgtttgtataacacttcttgcggcgatggttcctggctcttcgatcgggtggcggaggcggtggtggctgggagggatcctacggtcattcagc

SEQ ID NO: 273 - DNA, 158 bp, synthetic construct
  misc_feature 1..158: note = Synthetic nucleic acid
  source 1..158: mol_type = other DNA
cagacgacggccagtgtcgacatgtctgcaacaaaactgacccgccgcgaacaacgcgaacacttcttgcggcgatggttcctggctcttcgatctgccagaggcggagaaatctacctgcgtaaggaggaagcgccgggatcctacggtcattcagc

SEQ ID NO: 274 - DNA, 158 bp, synthetic construct
  misc_feature 1..158: note = Synthetic nucleic acid
  source 1..158: mol_type = other DNA
cagacgacggccagtgtcgacatgacgcaaacttataacgctgatgccattgaggtactcaccgaacacttcttgcggcgatggttcctggctcttcgatcgcaagagaaaggcgacatggcggagattgaggttccgggatcctacggtcattcagc

SEQ ID NO: 275 - DNA, 158 bp, synthetic construct
  misc_feature 1..158: note = Synthetic nucleic acid
  source 1..158: mol_type = other DNA
cagacgacggccagtgtcgacatggctatcgaaatcaaagtaccggacatcggggctgatgaagttaacacttcttgcggcgatggttcctggctcttcgatcacacgctgtctgacattcgccgtctggtgatgctcggatcctacggtcattcagc

SEQ ID NO: 276 - DNA, 158 bp, synthetic construct
  misc_feature 1..158: note = Synthetic nucleic acid
  source 1..158: mol_type = other DNA
cagacgacggccagtgtcgacatggctgaattcgaaaccacttttgcagatctgggcctgaaggctaacacttcttgcggcgatggttcctggctcttcgatcctaccggtcgtcgtcgtttcggtggtgatgcgcgaggatcctacggtcattcagc

SEQ ID NO: 277 - DNA, 158 bp, synthetic construct
  misc_feature 1..158: note = Synthetic nucleic acid
  source 1..158: mol_type = other DNA
cagacgacggccagtgtcgacatgtcttttagcgaattttatcagcgttcgattaacgaaccggagcaaacacttcttgcggcgatggttcctggctcttcgatcttggatcagatccgccaggcgatggaagagtttggatcctacggtcattcagc

SEQ ID NO: 278 - DNA, 158 bp, synthetic construct
  misc_feature 1..158: note = Synthetic nucleic acid
  source 1..158: mol_type = other DNA
cagacgacggccagtgtcgacatgacggagttagccagaaaaatagtcgcaggagtcgggaacacttcttgcggcgatggttcctggctcttcgatcagataagcgcaggtgaaccgctgttatccatcattcgcaatggatcctacggtcattcagc

SEQ ID NO: 279 - DNA, 158 bp, synthetic construct
  misc_feature 1..158: note = Synthetic nucleic acid
  source 1..158: mol_type = other DNA
cagacgacggccagtgtcgacatgaaaggacaagaaactcgtggttttcagtcagaagtgaaacagcttaacacttcttgcggcgatggttcctggctcttcgatcttcgtcgtatgaaccagctgctggtttccttaggatcctacggtcattcagc

SEQ ID NO: 280 - DNA, 158 bp, synthetic construct
  misc_feature 1..158: note = Synthetic nucleic acid
  source 1..158: mol_type = other DNA
cagacgacggccagtgtcgacatgatggacagcttacgcacggctgcaaacagtctcgtaacacttcttgcggcgatggttcctggctcttcgatcgaggcgaaaatcaaaattggcgatgcgctggaacagcaactgggatcctacggtcattcagc

SEQ ID NO: 281 - DNA, 158 bp, synthetic construct
  misc_feature 1..158: note = Synthetic nucleic acid
  source 1..158: mol_type = other DNA
cagacgacggccagtgtcgacttgccacacagtgatgaacttgatgccggtaatgtgctaacacttcttgcggcgatggttcctggctcttcgatcgtcgcacaaccacaatcagaatacgcattcatgcgtagaaggggatcctacggtcattcagc

SEQ ID NO: 282 - DNA, 158 bp, synthetic construct
  misc_feature 1..158: note = Synthetic nucleic acid
  source 1..158: mol_type = other DNA
cagacgacggccagtgtcgacatgagcactgataataagcaatcattgcccgcgattaccctaacacttcttgcggcgatggttcctggctcttcgatcaacagggttatcgaactgggtactcaggtcgaaatcgctggatcctacggtcattcagc

SEQ ID NO: 283 - DNA, 158 bp, synthetic construct
  misc_feature 1..158: note = Synthetic nucleic acid
  source 1..158: mol_type = other DNA
cagacgacggccagtgtcgacatgagttttgatattgccaaatacccgaccctggcactggtcgaaacacttcttgcggcgatggttcctggctcttcgatcggtatggaagccaaaatcaaggcctggctggcaatgggatcctacggtcattcagc

SEQ ID NO: 284 - DNA, 158 bp, synthetic construct
  misc_feature 1..158: note = Synthetic nucleic acid
  source 1..158: mol_type = other DNA
cagacgacggccagtgtcgacatggatagccatacgctgattcaggcgctgatttatctcggttaacacttcttgcggcgatggttcctggctcttcgatccatggcggatgaaccggaaacgaaaccctcatcccccggatcctacggtcattcagc

SEQ ID NO: 285 - DNA, 158 bp, synthetic construct
  misc_feature 1..158: note = Synthetic nucleic acid
  source 1..158: mol_type = other DNA
cagacgacggccagtgtcgacatgagcaaaggaacgaccagccaggatgccccaacacttcttgcggcgatggttcctggctcttcgatcatcaaaaaagagagtgatattgaaccgttaattgtggtgaaaaaggttggatcctacggtcattcagc

SEQ ID NO: 286 - DNA, 158 bp, synthetic construct
  misc_feature 1..158: note = Synthetic nucleic acid
  source 1..158: mol_type = other DNA
cagacgacggccagtgtcgacatgcgaaccctttggcgatttattgccggattttttaaatggacgtggaacacttcttgcggcgatggttcctggctcttcgatccgttttgcctgacctgcgccaacatgcgttttggatcctacggtcattcagc

SEQ ID NO: 287 - DNA, 158 bp, synthetic construct
  misc_feature 1..158: note = Synthetic nucleic acid
  source 1..158: mol_type = other DNA
cagacgacggccagtgtcgacatgaaaatgactttgccgtttaaaccccatgtgctggcgaacacttcttgcggcgatggttcctggctcttcgatcaacgtctctctgaacgtggagcaagaagactggaaagggtgggatcctacggtcattcagc

SEQ ID NO: 288 - DNA, 158 bp, synthetic construct
  misc_feature 1..158: note = Synthetic nucleic acid
  source 1..158: mol_type = other DNA
cagacgacggccagtgtcgacatgagacgatttctgacgacgctgatgatactcctggtaacacttcttgcggcgatggttcctggctcttcgatccgtaatggcaaagatgtgaagaagttgctggagaagatgtcgggatcctacggtcattcagc

SEQ ID NO: 289 - DNA, 158 bp, synthetic construct
  misc_feature 1..158: note = Synthetic nucleic acid
  source 1..158: mol_type = other DNA
cagacgacggccagtgtcgacatgcctaagtaccgttccgccaccaccactcatggtcgtaatatggaacacttcttgcggcgatggttcctggctcttcgatccgcggtgcgcgataaatcgaaactggggggtataggatcctacggtcattcagc

SEQ ID NO: 290 - DNA, 158 bp, synthetic construct
  misc_feature 1..158: note = Synthetic nucleic acid
  source 1..158: mol_type = other DNA
cagacgacggccagtgtcgacatggccttattacaaattagtgaacctggtttgagtgctgcgccgcataacacttcttgcggcgatggttcctggctcttcgatccgctgaaaggccattccgtggacgaggttccgggatcctacggtcattcagc

SEQ ID NO: 291 - DNA, 158 bp, synthetic construct
  misc_feature 1..158: note = Synthetic nucleic acid
  source 1..158: mol_type = other DNA
cagacgacggccagtgtcgacatgccaattcaggtcttaccgccacaactggcaacacttcttgcggcgatggttcctggctcttcgatccaatctgttgatttacatccggcgataaaagccctgaaagatgaggtaggatcctacggtcattcagc

SEQ ID NO: 292 - DNA, 158 bp, synthetic construct
  misc_feature 1..158: note = Synthetic nucleic acid
  source 1..158: mol_type = other DNA
cagacgacggccagtgtcgacatgttgcttaatatgatgtgtggtcgtcagctgtcggcaataacacttcttgcggcgatggttcctggctcttcgatctcgcaaatcgtatcgaaagcggaacaattaatcaggcagggatcctacggtcattcagc

SEQ ID NO: 293 - DNA, 158 bp, synthetic construct
  misc_feature 1..158: note = Synthetic nucleic acid
  source 1..158: mol_type = other DNA
cagacgacggccagtgtcgacgtgttaaaccgttatcctttgtggaagtacgtcatgctgatcgtggtaacacttcttgcggcgatggttcctggctcttcgatcggcggcaagcgcgtcaagaagctgtcaatcaccggatcctacggtcattcagc

SEQ ID NO: 294 - DNA, 158 bp, synthetic construct
  misc_feature 1..158: note = Synthetic nucleic acid
  source 1..158: mol_type = other DNA
cagacgacggccagtgtcgacatgattaaaaaagcttcgctgctgacggcgtgttccgtcaaacacttcttgcggcgatggttcctggctcttcgatcaggacgggaatacaccttgtctggcagctacaccttcggcggatcctacggtcattcagc

SEQ ID NO: 295 - DNA, 158 bp, synthetic construct
  misc_feature 1..158: note = Synthetic nucleic acid
  source 1..158: mol_type = other DNA
cagacgacggccagtgtcgacatgattattgcgactgccggacacgttgaccaaacacttcttgcggcgatggttcctggctcttcgatcggaaatgatcatttattgcgcgacgcattattatttccggaaaaatggggatcctacggtcattcagc

SEQ ID NO: 296 - DNA, 158 bp, synthetic construct
  misc_feature 1..158: note = Synthetic nucleic acid
  source 1..158: mol_type = other DNA
cagacgacggccagtgtcgacatgaacatgcttgccttaaccattattttgccattgattggcttcgtaacacttcttgcggcgatggttcctggctcttcgatcgtggtgctggcactgttgatggtactgcgtgcaggatcctacggtcattcagc

SEQ ID NO: 297 - DNA, 158 bp, synthetic construct
  misc_feature 1..158: note = Synthetic nucleic acid
  source 1..158: mol_type = other DNA
cagacgacggccagtgtcgacatggagcaaaacccgcagtcacagctgaaacttcttgtcaccaacacttcttgcggcgatggttcctggctcttcgatcgccgttctgaagtgctgcgtagcttcctggacgatagaggatcctacggtcattcagc

SEQ ID NO: 298 - DNA, 158 bp, synthetic construct
  misc_feature 1..158: note = Synthetic nucleic acid
  source 1..158: mol_type = other DNA
cagacgacggccagtgtcgacgtgaacggtgaattgatttgggttctttcattactggccgttaacacttcttgcggcgatggttcctggctcttcgatctttgtgtggtgatgatcccgatgctgtttccgtttcttggatcctacggtcattcagc

SEQ ID NO: 299 - DNA, 158 bp, synthetic construct
  misc_feature 1..158: note = Synthetic nucleic acid
  source 1..158: mol_type = other DNA
cagacgacggccagtgtcgacgtgagtgatcagtttgacgcaaaagcgtttttaaaaaccgtaaccaaacacttcttgcggcgatggttcctggctcttcgatcggcagaaaagatcttctggtcgttgaaacattccggatcctacggtcattcagc

SEQ ID NO: 300 - DNA, 158 bp, synthetic construct
  misc_feature 1..158: note = Synthetic nucleic acid
  source 1..158: mol_type = other DNA
cagacgacggccagtgtcgacatgtgtggaattgttggcgcgatcgcgcaacgtgatgtaaacacttcttgcggcgatggttcctggctcttcgatcaccagccgcgtaacctggcaaaatcggttacggttgagaggggatcctacggtcattcagc

SEQ ID NO: 301 - DNA, 158 bp, synthetic construct
  misc_feature 1..158: note = Synthetic nucleic acid
  source 1..158: mol_type = other DNA
cagacgacggccagtgtcgacgtggcgcaggcggaagtgttgaatctggagtccggagctaaaaacacttcttgcggcgatggttcctggctcttcgatctgattcgtgcgcatgttgatggcgatgacgaagagcccggatcctacggtcattcagc

SEQ ID NO: 302 - DNA, 158 bp, synthetic construct
  misc_feature 1..158: note = Synthetic nucleic acid
  source 1..158: mol_type = other DNA
cagacgacggccagtgtcgacatgaaattgcaaaagcaattactggaagctgtggagcacaaacagctaaacacttcttgcggcgatggttcctggctcttcgatcgtctggcggcgttgtttagttcacgggaacgaggatcctacggtcattcagc

SEQ ID NO: 303 - DNA, 158 bp, synthetic construct
  misc_feature 1..158: note = Synthetic nucleic acid
  source 1..158: mol_type = other DNA
cagacgacggccagtgtcgacatgagcgcaatttccctgatcaatagcggcgtggcgtaacacttcttgcggcgatggttcctggctcttcgatcactggcggtactggtggtgattattgtttcacgaggagcccaaggatcctacggtcattcagc

SEQ ID NO: 304 - DNA, 158 bp, synthetic construct
  misc_feature 1..158: note = Synthetic nucleic acid
  source 1..158: mol_type = other DNA
cagacgacggccagtgtcgacatgcattatatgaagtggatttatccacgccgcttacgcaataacacttcttgcggcgatggttcctggctcttcgatcttttaccgatcaacccgcagggaaatcagactgtagcaggatcctacggtcattcagc

SEQ ID NO: 305 - DNA, 158 bp, synthetic construct
  misc_feature 1..158: note = Synthetic nucleic acid
  source 1..158: mol_type = other DNA
cagacgacggccagtgtcgacgtgatcgaaaaattgcgtaatatcgccatcatcgcgcacgtagaccatggtaaaaaacacttcttgcggcgatggttcctggctcttcgatccaaccgcgcaccgaaagacgatcaaggatcctacggtcattcagc

SEQ ID NO: 306 - DNA, 158 bp, synthetic construct
  misc_feature 1..158: note = Synthetic nucleic acid
  source 1..158: mol_type = other DNA
cagacgacggccagtgtcgacatgattgtgcgcatactgctgctgtttatcgctctgttcacctttgaacacttcttgcggcgatggttcctggctcttcgatccaaactgccgtccgccagcaaacagggagagatcggatcctacggtcattcagc

SEQ ID NO: 307 - DNA, 158 bp, synthetic construct
  misc_feature 1..158: note = Synthetic nucleic acid
  source 1..158: mol_type = other DNA
cagacgacggccagtgtcgacatgttaaatgcatggcacctgccggtgcccccatttaacacttcttgcggcgatggttcctggctcttcgatcttctggctttgcctgccatttcggctacggtatggatgaactggggatcctacggtcattcagc

SEQ ID NO: 308 - DNA, 158 bp, synthetic construct
  misc_feature 1..158: note = Synthetic nucleic acid
  source 1..158: mol_type = other DNA
cagacgacggccagtgtcgacatgaatccacaattgttacgcgtaacaaatcgaatcattgaacgttcgaacacttcttgcggcgatggttcctggctcttcgatcccgaacagggcgcaacctgtatcacttttataggatcctacggtcattcagc

SEQ ID NO: 309 - DNA, 158 bp, synthetic construct
  misc_feature 1..158: note = Synthetic nucleic acid
  source 1..158: mol_type = other DNA
cagacgacggccagtgtcgacatgttacgtcctgtagaaaccccaacccgtgaaatcaaaaaactcgaaacacttcttgcggcgatggttcctggctcttcgatcggtgaaaaaccgcagcagggaggcaaacaattgggatcctacggtcattcagc

SEQ ID NO: 310 - DNA, 158 bp, synthetic construct
  misc_feature 1..158: note = Synthetic nucleic acid
  source 1..158: mol_type = other DNA
cagacgacggccagtgtcgacgtgcaaacctttcaagccgatcttgccattgtaggcgccgaacacttcttgcggcgatggttcctggctcttcgatcggcggaagcagccaataagaaggagaaggcgaatggcattggatcctacggtcattcagc

SEQ ID NO: 311 - DNA, 158 bp, synthetic construct
  misc_feature 1..158: note = Synthetic nucleic acid
  source 1..158: mol_type = other DNA
cagacgacggccagtgtcgacatggaaggttccgattttttactcgcaggagtgctgtttctcttcgaacacttcttgcggcgatggttcctggctcttcgatcacgccagctggacggctgggatgaatttgagctaggatcctacggtcattcagc

SEQ ID NO: 312 - DNA, 158 bp, synthetic construct
  misc_feature 1..158: note = Synthetic nucleic acid
  source 1..158: mol_type = other DNA
cagacgacggccagtgtcgacatgaagaatatacgtaacttttcgatcatagctcacattgaccacggtaaatcgaaacacttcttgcggcgatggttcctggctcttcgatcgcacgtcggcaaagacaacaaacgaggatcctacggtcattcagc

SEQ ID NO: 313 - DNA, 158 bp, synthetic construct
  misc_feature 1..158: note = Synthetic nucleic acid
  source 1..158: mol_type = other DNA
cagacgacggccagtgtcgacatgacgacacaggtcccaccttccgcgttgcttccgttaacacttcttgcggcgatggttcctggctcttcgatcgagctgcgcgtagagcgccgttatcagcgagatgtctacaacggatcctacggtcattcagc

SEQ ID NO: 314 - DNA, 158 bp, synthetic construct
  misc_feature 1..158: note = Synthetic nucleic acid
  source 1..158: mol_type = other DNA
cagacgacggccagtgtcgacatgcttaaacgttgtctctctccgctcaccctggttaataacacttcttgcggcgatggttcctggctcttcgatcaaaaaactttcacagacgtccaaggagatacccatgagttgggatcctacggtcattcagc

SEQ ID NO: 315 - DNA, 158 bp, synthetic construct
  misc_feature 1..158: note = Synthetic nucleic acid
  source 1..158: mol_type = other DNA
cagacgacggccagtgtcgacatgagcactcagtacgaaactcagggatacaccatcaataatgccggaaacacttcttgcggcgatggttcctggctcttcgatcgtagcgagctgatctccgtgcaggtgcgtcttggatcctacggtcattcagc

SEQ ID NO: 316 - DNA, 158 bp, synthetic construct
  misc_feature 1..158: note = Synthetic nucleic acid
  source 1..158: mol_type = other DNA
cagacgacggccagtgtcgacatgaccgacttaaccgcgcaagaacccgcctgaacacttcttgcggcgatggttcctggctcttcgatcgtttatctgggcagtatcgattttgttatgtcagatgtggaccgcaaaggatcctacggtcattcagc

SEQ ID NO: 317 - DNA, 158 bp, synthetic construct
  misc_feature 1..158: note = Synthetic nucleic acid
  source 1..158: mol_type = other DNA
cagacgacggccagtgtcgacatgcgtagttttagccaactgtggccgactctcaagcgcctgttaaacacttcttgcggcgatggttcctggctcttcgatcccagcgtgcgtgaagaggaatcattgagcgccggcggatcctacggtcattcagc

SEQ ID NO: 318 - DNA, 158 bp, synthetic construct
  misc_feature 1..158: note = Synthetic nucleic acid
  source 1..158: mol_type = other DNA
cagacgacggccagtgtcgacatggcaaaaatgagagccgttgacgcggcaatgtatgtgctaacacttcttgcggcgatggttcctggctcttcgatcgacgcaccgactgaaacctgcttcatgcactatgaactcggatcctacggtcattcagc

SEQ ID NO: 319 - DNA, 158 bp, synthetic construct
  misc_feature 1..158: note = Synthetic nucleic acid
  source 1..158: mol_type = other DNA
cagacgacggccagtgtcgacatggagcttgctactacgcagtcagtattgatgcaaattcaacaacacttcttgcggcgatggttcctggctcttcgatctcgcaagattaagaaatatgagttgttaaacacagccggatcctacggtcattcagc

SEQ ID NO: 320 - DNA, 158 bp, synthetic construct
  misc_feature 1..158: note = Synthetic nucleic acid
  source 1..158: mol_type = other DNA
cagacgacggccagtgtcgacatgaaaaaaatcagcttaccgaaaattggtatccgcccggttattgaaacacttcttgcggcgatggttcctggctcttcgatctgccagaactacggtccgttgtacaagcgtctcggatcctacggtcattcagc

SEQ ID NO: 321 - DNA, 158 bp, synthetic construct
  misc_feature 1..158: note = Synthetic nucleic acid
  source 1..158: mol_type = other DNA
cagacgacggccagtgtcgacatgcgtacagaatattgtggacagctccgtttgtcccaaacacttcttgcggcgatggttcctggctcttcgatcgagctgagcattcaggttgtgaagaaggctgagaataacggatcctacggtcattcagccgc

SEQ ID NO: 322 - DNA, 158 bp, synthetic construct
  misc_feature 1..158: note = Synthetic nucleic acid
  source 1..158: mol_type = other DNA
cagacgacggccagtgtcgacgtgcgattatttgctcaattaagctggtatttccgtcgggaatggcgtaacacttcttgcggcgatggttcctggctcttcgatccggaaaatcgcgaggaggccgtcgatgcgtatggatcctacggtcattcagc

SEQ ID NO: 323 - DNA, 158 bp, synthetic construct
  misc_feature 1..158: note = Synthetic nucleic acid
  source 1..158: mol_type = other DNA
cagacgacggccagtgtcgacatgaaagcagcggcgaaaacgcagaaaccaaaacgtaacacttcttgcggcgatggttcctggctcttcgatcaatttgtgattaatcaaggcgaggggacaggtggcagatcgtcaggatcctacggtcattcagc

SEQ ID NO: 324 - DNA, 158 bp, synthetic construct
  misc_feature 1..158: note = Synthetic nucleic acid
  source 1..158: mol_type = other DNA
cagacgacggccagtgtcgacatgaaattgccagtcagagaatttgatgcagttgtgattggtgccgaacacttcttgcggcgatggttcctggctcttcgatccccggcattcccgccgaagattcgtacttaccgaggatcctacggtcattcagc

SEQ ID NO: 325 - DNA, 158 bp, synthetic construct
  misc_feature 1..158: note = Synthetic nucleic acid
  source 1..158: mol_type = other DNA
cagacgacggccagtgtcgacatgaataaatctcgtcaaaaagagttaacccgctggttaaaacagcaaagcaacacttcttgcggcgatggttcctggctcttcgatctactggcccatcgtcaggaggagatttcgggatcctacggtcattcagc

SEQ ID NO: 326 - DNA, 158 bp, synthetic construct
  misc_feature 1..158: note = Synthetic nucleic acid
  source 1..158: mol_type = other DNA
cagacgacggccagtgtcgacatgacgcaaacatttatccccggcaaagatgccgctctggaagattaacacttcttgcggcgatggttcctggctcttcgatcgcagcgcgccaaagcagcattctgggcaaaactaggatcctacggtcattcagc

SEQ ID NO: 327 - DNA, 158 bp, synthetic construct
  misc_feature 1..158: note = Synthetic nucleic acid
  source 1..158: mol_type = other DNA
cagacgacggccagtgtcgacatgatttttacacttcgcccatatcagcaagaagccgtggatgccaaacacttcttgcggcgatggttcctggctcttcgatctcgttttcgtctggcgcacgaattacgcggtctaggatcctacggtcattcagc

SEQ ID NO: 328 - DNA, 158 bp, synthetic construct
  misc_feature 1..158: note = Synthetic nucleic acid
  source 1..158: mol_type = other DNA
cagacgacggccagtgtcgacatggtaactcatcgtcagcgctaccgtgaaaaagtctccaacacttcttgcggcgatggttcctggctcttcgatctgcaagtgctgacagacgagaagcgttttatcgctaaccgtggatcctacggtcattcagc

SEQ ID NO: 329 - DNA, 158 bp, synthetic construct
  misc_feature 1..158: note = Synthetic nucleic acid
  source 1..158: mol_type = other DNA
cagacgacggccagtgtcgacttgaccattacgaaacttgcatggcgtgacctggttcctaacacttcttgcggcgatggttcctggctcttcgatccatggccattacgttggctgaactggtttattccgaactctggatcctacggtcattcagc

SEQ ID NO: 330 - DNA, 158 bp, synthetic construct
  misc_feature 1..158: note = Synthetic nucleic acid
  source 1..158: mol_type = other DNA
cagacgacggccagtgtcgacatggaaaattcacgcatccctggggaacatttttttaccaccaaacacttcttgcggcgatggttcctggctcttcgatcttttacggtttcgatggcggtgcgtcgtgataaccaaggatcctacggtcattcagc

SEQ ID NO: 331 - DNA, 158 bp, synthetic construct
  misc_feature 1..158: note = Synthetic nucleic acid
  source 1..158: mol_type = other DNA
cagacgacggccagtgtcgacatgcataacgacaaagatctctctacgtggcagacattccgaacacttcttgcggcgatggttcctggctcttcgatcgtttacgcgcaacttcacaaaatgcagtttggccaactcggatcctacggtcattcagc

SEQ ID NO: 332 - DNA, 158 bp, synthetic construct
  misc_feature 1..158: note = Synthetic nucleic acid
  source 1..158: mol_type = other DNA
cagacgacggccagtgtcgacatgctaaacgaacgccagttaaagattgtcgatctgctggaaacacttcttgcggcgatggttcctggctcttcgatcggatatgaggcatttatggagttacttcacaagggggtcggatcctacggtcattcagc

SEQ ID NO: 333 - DNA, 158 bp, synthetic construct
  misc_feature 1..158: note = Synthetic nucleic acid
  source 1..158: mol_type = other DNA
cagacgacggccagtgtcgacatggctggacgaatcccacgcgtattcattaatgatctgctaacacttcttgcggcgatggttcctggctcttcgatcgagctctggacattaaaccaggagctggcgaaaaaggctggatcctacggtcattcagc

SEQ ID NO: 334 - DNA, 158 bp, synthetic construct
  misc_feature 1..158: note = Synthetic nucleic acid
  source 1..158: mol_type = other DNA
cagacgacggccagtgtcgacatgataaaaccgacgtttttacgccgggtggccattgctgctctaacacttcttgcggcgatggttcctggctcttcgatcccgcgctcggtggatgatttaacggcggggtacaagggatcctacggtcattcagc

SEQ ID NO: 335 - DNA, 158 bp, synthetic construct
  misc_feature 1..158: note = Synthetic nucleic acid
  source 1..158: mol_type = other DNA
cagacgacggccagtgtcgacatgaatgatgccgttatcacgctgaacggcctaacacttcttgcggcgatggttcctggctcttcgatctttattcagttgatccacgactgggataaggagcatagcaatgagtcgggatcctacggtcattcagc

SEQ ID NO: 336 - DNA, 158 bp, synthetic construct
  misc_feature 1..158: note = Synthetic nucleic acid
  source 1..158: mol_type = other DNA
cagacgacggccagtgtcgacatgccgcgtggcctggaattattgattgctcaaaccattttaacacttcttgcggcgatggttcctggctcttcgatccaaagatttagcgtacggtatggggagatgctttttagcggatcctacggtcattcagc

SEQ ID NO: 337 - DNA, 158 bp, synthetic construct
  misc_feature 1..158: note = Synthetic nucleic acid
  source 1..158: mol_type = other DNA
cagacgacggccagtgtcgacatgcattccacagaagtccaggctaaacctctttttagctggaaaaacacttcttgcggcgatggttcctggctcttcgatccactgccctatggcgatcaggtgggtaatcaggtgggatcctacggtcattcagc

SEQ ID NO: 338 - DNA, 158 bp, synthetic construct
  misc_feature 1..158: note = Synthetic nucleic acid
  source 1..158: mol_type = other DNA
cagacgacggccagtgtcgacgtgaaacaacagatacaacttcgtcgccgtgaagtcgataacacttcttgcggcgatggttcctggctcttcgatcgcagcctgcaaattatcatcgacaatatctggccaattgagggatcctacggtcattcagc

SEQ ID NO: 339 - DNA, 158 bp, synthetic construct
  misc_feature 1..158: note = Synthetic nucleic acid
  source 1..158: mol_type = other DNA
cagacgacggccagtgtcgacgtgcgctatatccgacagttatgctgtgtaagcttactctgcttaaaacacttcttgcggcgatggttcctggctcttcgatcacagttttacatcggtctggggccagaattaaacggatcctacggtcattcagc

SEQ ID NO: 340 - DNA, 158 bp, synthetic construct
  misc_feature 1..158: note = Synthetic nucleic acid
  source 1..158: mol_type = other DNA
cagacgacggccagtgtcgacatgatttcaggcattttagcatccccgggtatcgctttaacacttcttgcggcgatggttcctggctcttcgatcacgctggttaacaagttcattgaagaaaaaacaatctgctggggatcctacggtcattcagc

SEQ ID NO: 341 - DNA, 158 bp, synthetic construct
  misc_feature 1..158: note = Synthetic nucleic acid
  source 1..158: mol_type = other DNA
cagacgacggccagtgtcgacatggagatgttgtctggagccgagatggtcgtccgataacacttcttgcggcgatggttcctggctcttcgatccggaatggatgaaatgtggttaagcaaaacggagagaacctgtggatcctacggtcattcagc

SEQ ID NO: 342 - DNA, 158 bp, synthetic construct
  misc_feature 1..158: note = Synthetic nucleic acid
  source 1..158: mol_type = other DNA
cagacgacggccagtgtcgacatggataacgttgaactttcacccgcaacacgctaacacttcttgcggcgatggttcctggctcttcgatctcttgtagtggatggtgaaaggctgaatgtgaatctgaatgaggggggatcctacggtcattcagc

SEQ ID NO: 343 - DNA, 158 bp, synthetic construct
  misc_feature 1..158: note = Synthetic nucleic acid
  source 1..158: mol_type = other DNA
cagacgacggccagtgtcgacatgcgcgctttgctaccctatctggcactgtataaacgtaacacttcttgcggcgatggttcctggctcttcgatcccagacaggggcgttattaccagttcaagcagggtttgcacggatcctacggtcattcagc

SEQ ID NO: 344 - DNA, 158 bp, synthetic construct
  misc_feature 1..158: note = Synthetic nucleic acid
  source 1..158: mol_type = other DNA
cagacgacggccagtgtcgacatgaaacaaacggttgcagcttatatcgccaaaacactcgaataacacttcttgcggcgatggttcctggctcttcgatcagtgatcgaactggcgaaaacaaactggctaaggtgcggatcctacggtcattcagc

SEQ ID NO: 345 - DNA, 158 bp, synthetic construct
  misc_feature 1..158: note = Synthetic nucleic acid
  source 1..158: mol_type = other DNA
cagacgacggccagtgtcgacatgcgtactagccaatacctgctctccactctcaaggaaacacttcttgcggcgatggttcctggctcttcgatcggtgacatcgtcgaatatctggtgaaacagattaaaggctgcggatcctacggtcattcagc

SEQ ID NO: 346 - DNA, 158 bp, synthetic construct
  misc_feature 1..158: note = Synthetic nucleic acid
  source 1..158: mol_type = other DNA
cagacgacggccagtgtcgacatgaattcgttacaaatcttgagttttgtcggttttacgctgctggtaacacttcttgcggcgatggttcctggctcttcgatcacctttactcccgacgggaaggatagcctagcgggatcctacggtcattcagc

SEQ ID NO: 347 - DNA, 158 bp, synthetic construct
  misc_feature 1..158: note = Synthetic nucleic acid
  source 1..158: mol_type = other DNA
cagacgacggccagtgtcgacatgtcttccatgacaacaactgataataaagcctttttgaatgaacttgctcgtaacacttcttgcggcgatggttcctggctcttcgatcggaaaaactggcaggaagtggagcctggatcctacggtcattcagc

SEQ ID NO: 348 - DNA, 158 bp, synthetic construct
  misc_feature 1..158: note = Synthetic nucleic acid
  source 1..158: mol_type = other DNA
cagacgacggccagtgtcgacatgagcgaaaaacatccagggcctttagtggtcgaaggaaaactgacaaacacttcttgcggcgatggttcctggctcttcgatctgctcgatccggcgcgtgatttgtgggatcggggatcctacggtcattcagc

SEQ ID NO: 349 - DNA, 158 bp, synthetic construct
  misc_feature 1..158: note = Synthetic nucleic acid
  source 1..158: mol_type = other DNA
cagacgacggccagtgtcgacatgaaatttattgggaagctgcttctctacattctcatcgctctgttagtaacacttcttgcggcgatggttcctggctcttcgatcgaagttacatcgacggagccggtgcggagaggatcctacggtcattcagc

SEQ ID NO: 350 - DNA, 158 bp, synthetic construct
  misc_feature 1..158: note = Synthetic nucleic acid
  source 1..158: mol_type = other DNA
cagacgacggccagtgtcgacatgtctgaagaaaaattaggtcaacattatctcgccgcgctgaataacacttcttgcggcgatggttcctggctcttcgatcacagcattgagcgtaaaaactcgccgctgaaaccgggatcctacggtcattcagc

SEQ ID NO: 351 - DNA, 158 bp, synthetic construct
  misc_feature 1..158: note = Synthetic nucleic acid
  source 1..158: mol_type = other DNA
cagacgacggccagtgtcgacatgagccagagaattactattgatccggtaacccgtattgagggaacacttcttgcggcgatggttcctggctcttcgatcgacggcaacgaagtggtttcagtgaaggttctgccaggatcctacggtcattcagc

SEQ ID NO: 352 - DNA, 158 bp, synthetic construct
  misc_feature 1..158: note = Synthetic nucleic acid
  source 1..158: mol_type = other DNA
cagacgacggccagtgtcgacatgcgattgctcaaccgtcttaaccagtatcaacgtctgtggcaaccttcaacacttcttgcggcgatggttcctggctcttcgatcgaagcctggcttcccgcgccatcgcaacaaggatcctacggtcattcagc

SEQ ID NO: 353 - DNA, 158 bp, synthetic construct
  misc_feature 1..158: note = Synthetic nucleic acid
  source 1..158: mol_type = other DNA
cagacgacggccagtgtcgacatggcgattgcaattggcctcgattttggcagtgattctgtgcgagctttaacacttcttgcggcgatggttcctggctcttcgatccaggctgcccaggccgttgcgactctacaaggatcctacggtcattcagc

SEQ ID NO: 354 - DNA, 158 bp, synthetic construct
  misc_feature 1..158: note = Synthetic nucleic acid
  source 1..158: mol_type = other DNA
cagacgacggccagtgtcgacgtgattgttaaacgacccgtctcggccagtctggcaacacttcttgcggcgatggttcctggctcttcgatcattagctttcgctctgcggagggtgaggaaagtcagttaatgcgtggatcctacggtcattcagc

SEQ ID NO: 355 - DNA, 158 bp, synthetic construct
  misc_feature 1..158: note = Synthetic nucleic acid
  source 1..158: mol_type = other DNA
cagacgacggccagtgtcgacatgaaatcccccgcaccttctcgcccgcaaaaaatggcgttaattaacacttcttgcggcgatggttcctggctcttcgatcaaccctcaaccaaagaggcacaacccacacctactggatcctacggtcattcagc

SEQ ID NO: 356 - DNA, 158 bp, synthetic construct
  misc_feature 1..158: note = Synthetic nucleic acid
  source 1..158: mol_type = other DNA
cagacgacggccagtgtcgacatggaaccaaaaacaaaaaaacagcgttcgctttatatcccttacgctaacacttcttgcggcgatggttcctggctcttcgatcaataccgcgactaccgccgtacctccatccggggatcctacggtcattcagc

SEQ ID NO: 357 - DNA, 158 bp, synthetic construct
  misc_feature 1..158: note = Synthetic nucleic acid
  source 1..158: mol_type = other DNA
cagacgacggccagtgtcgacatggctcaacgcatctttacgctgatcctgctactttgcagcacttaacacttcttgcggcgatggttcctggctcttcgatccttcagcgcacatttgcgcgatcgccaaccgtggggatcctacggtcattcagc

SEQ ID NO: 358 - DNA, 158 bp, synthetic construct
  misc_feature 1..158: note = Synthetic nucleic acid
  source 1..158: mol_type = other DNA
cagacgacggccagtgtcgacgtgcacgaaatattcaacatgctgctggcggtcttcgatcggaacacttcttgcggcgatggttcctggctcttcgatcgcaccccagtcgcctcacaggctacgttattgcttggtggatcctacggtcattcagc

SEQ ID NO: 359 - DNA, 158 bp, synthetic construct
  misc_feature 1..158: note = Synthetic nucleic acid
  source 1..158: mol_type = other DNA
cagacgacggccagtgtcgacgtgcagcacgagacaaaaatggaaaaccagagctggttgaaaaaaaacacttcttgcggcgatggttcctggctcttcgatcggcgtaatcgggtattcgcgagcgataacgctgaaggatcctacggtcattcagc

SEQ ID NO: 360 - DNA, 158 bp, synthetic construct
  misc_feature 1..158: note = Synthetic nucleic acid
  source 1..158: mol_type = other DNA
cagacgacggccagtgtcgacatgaaaacgctgctgattattgacgctaatctcggtcaggcacgcaacacttcttgcggcgatggttcctggctcttcgatcgtccggaagtggacgcagtagcgaaagcagcggacggatcctacggtcattcagc

SEQ ID NO: 361 - DNA, 158 bp, synthetic construct
  misc_feature 1..158: note = Synthetic nucleic acid
  source 1..158: mol_type = other DNA
cagacgacggccagtgtcgacatgagatacatcaaatcgattacacagcagaagctgagctttttgcttgcaataacacttcttgcggcgatggttcctggctcttcgatccaggcaaaagaggcagcggctaactccggatcctacggtcattcagc

SEQ ID NO: 362 - DNA, 158 bp, synthetic construct
  misc_feature 1..158: note = Synthetic nucleic acid
  source 1..158: mol_type = other DNA
cagacgacggccagtgtcgacatgagtggtgaaaaaaaggcgaaaggctggcggttctatggtcttgtaaacacttcttgcggcgatggttcctggctcttcgatcagtggctacccataacctggcagccgctacttggatcctacggtcattcagc

SEQ ID NO: 363 - DNA, 158 bp, synthetic construct
  misc_feature 1..158: note = Synthetic nucleic acid
  source 1..158: mol_type = other DNA
cagacgacggccagtgtcgacatggcaagttcgggcacaacatcgacgcgtaagcgctttaccaacacttcttgcggcgatggttcctggctcttcgatccgccaggtgcggcgaatactgaaatggtgggggaaataggatcctacggtcattcagc

SEQ ID NO: 364 - DNA, 158 bp, synthetic construct
  misc_feature 1..158: note = Synthetic nucleic acid
  source 1..158: mol_type = other DNA
cagacgacggccagtgtcgacatgtacgattttaatctggtgttgctgctgcttcagcagatgtaacacttcttgcggcgatggttcctggctcttcgatcaataacgttacgactaccatggagggacgaggcagatggatcctacggtcattcagc

SEQ ID NO: 365 - DNA, 158 bp, synthetic construct
  misc_feature 1..158: note = Synthetic nucleic acid
  source 1..158: mol_type = other DNA
cagacgacggccagtgtcgacttgaagaaggtttggcttaaccgttatcccgcggacgttccgaaacacttcttgcggcgatggttcctggctcttcgatctgacgaagcgcgcggcaaagtggacaataaagcccgtggatcctacggtcattcagc

SEQ ID NO: 366 - DNA, 158 bp, synthetic construct
  misc_feature 1..158: note = Synthetic nucleic acid
  source 1..158: mol_type = other DNA
cagacgacggccagtgtcgacatgaaagtatggatggcgatattaataggtatcttgtgctggcaatcatctaacacttcttgcggcgatggttcctggctcttcgatccccagcagatcacaggttttgaacctaagggatcctacggtcattcagc

SEQ ID NO: 367 - DNA, 158 bp, synthetic construct
  misc_feature 1..158: note = Synthetic nucleic acid
  source 1..158: mol_type = other DNA
cagacgacggccagtgtcgacatggttacctggacccaaatgtatatgccgatgggaggactaacacttcttgcggcgatggttcctggctcttcgatcctgcaggcgtatgtgtttaccgggatgttagtctcgcatggatcctacggtcattcagc

SEQ ID NO: 368 - DNA, 158 bp, synthetic construct
  misc_feature 1..158: note = Synthetic nucleic acid
  source 1..158: mol_type = other DNA
cagacgacggccagtgtcgacatgaaacagaaaattacggattacctggacgaaatctacggtggaacatttaaacacttcttgcggcgatggttcctggctcttcgatccccctggcaggttatgtggattaaacccggatcctacggtcattcagc

SEQ ID NO: 369 - DNA, 158 bp, synthetic construct
  misc_feature 1..158: note = Synthetic nucleic acid
  source 1..158: mol_type = other DNA
cagacgacggccagtgtcgacatgactcaatttacgcaaaataccgccatgccttcttccctctggcaatactaacacttcttgcggcgatggttcctggctcttcgatccggcgactgggtgccttacccgcagtggggatcctacggtcattcagc

SEQ ID NO: 370 - DNA, 158 bp, synthetic construct
  misc_feature 1..158: note = Synthetic nucleic acid
  source 1..158: mol_type = other DNA
cagacgacggccagtgtcgacgtgaacaaaatattttcctcacatgtgatgcctttccgcgctctgatcgaaacacttcttgcggcgatggttcctggctcttcgatcaatcgtcgcgcggcgatggcggatttaagcggatcctacggtcattcagc

SEQ ID NO: 371 - DNA, 158 bp, synthetic construct
  misc_feature 1..158: note = Synthetic nucleic acid
  source 1..158: mol_type = other DNA
cagacgacggccagtgtcgacatgcatcacgccaccccgcttatcaccaccattgttggcggccttaacacttcttgcggcgatggttcctggctcttcgatcaaacgccaccggcgggtgaggtggtgacgggggtaggatcctacggtcattcagc

SEQ ID NO: 372 - DNA, 158 bp, synthetic construct
  misc_feature 1..158: note = Synthetic nucleic acid
  source 1..158: mol_type = other DNA
cagacgacggccagtgtcgacatggctgcgcaagggttcttactgatcgccacgtttttactggtaacacttcttgcggcgatggttcctggctcttcgatcctggcgcttggtccggtggcggaatatctctccttcggatcctacggtcattcagc

SEQ ID NO: 373 - DNA, 158 bp, synthetic construct
  misc_feature 1..158: note = Synthetic nucleic acid
  source 1..158: mol_type = other DNA
cagacgacggccagtgtcgacatggataatgcagaactcgccattggtatcgatctcggtactacaacacttcttgcggcgatggttcctggctcttcgatccgggcgagcgattatttagccattgagatcccatacggatcctacggtcattcagc

SEQ ID NO: 374 - DNA, 158 bp, synthetic construct
  misc_feature 1..158: note = Synthetic nucleic acid
  source 1..158: mol_type = other DNA
cagacgacggccagtgtcgacatgtcagtaagcgcatttaaccgacgctgggcggcggtaacacttcttgcggcgatggttcctggctcttcgatccaaacgctccagcaacttctggcgcaggtaagccatttaggatcctacggtcattcagccgc

SEQ ID NO: 375 - DNA, 158 bp, synthetic construct
  misc_feature 1..158: note = Synthetic nucleic acid
  source 1..158: mol_type = other DNA
cagacgacggccagtgtcgacttgcaatttgactacatcattattggtgccggctcagccgaacacttcttgcggcgatggttcctggctcttcgatcttttgtggcaaatgggatgccggtgagagcgaaaaaaccgggatcctacggtcattcagc

SEQ ID NO: 376 - DNA, 158 bp, synthetic construct
  misc_feature 1..158: note = Synthetic nucleic acid
  source 1..158: mol_type = other DNA
cagacgacggccagtgtcgacatgatccacgcctttattaaaaaagggtgttttcaggattcggtcaaacacttcttgcggcgatggttcctggctcttcgatcaaaactggctcgtttattagaacgtttgcaaagtggatcctacggtcattcagc

SEQ ID NO: 377 - DNA, 158 bp, synthetic construct
  misc_feature 1..158: note = Synthetic nucleic acid
  source 1..158: mol_type = other DNA
cagacgacggccagtgtcgacgtgaacgttaattcatcgtcaaatcgtggcgaagcgattctcgaacacttcttgcggcgatggttcctggctcttcgatcctacggcattgatcgtaaccgttcgccgctgaaggtaggatcctacggtcattcagc

SEQ ID NO: 378 - DNA, 158 bp, synthetic construct
  misc_feature 1..158: note = Synthetic nucleic acid
  source 1..158: mol_type = other DNA
cagacgacggccagtgtcgacgtggctcaattcgtttataccatgcatcgtgtcggcaaagttaacacttcttgcggcgatggttcctggctcttcgatcagccgaagcgtatcaagtacaagcgtattgcgaagctaggatcctacggtcattcagc

SEQ ID NO: 379 - DNA, 158 bp, synthetic construct
  misc_feature 1..158: note = Synthetic nucleic acid
  source 1..158: mol_type = other DNA
cagacgacggccagtgtcgacatgagtgaggcagaagcccgcccgactaactttatccgtcagataacacttcttgcggcgatggttcctggctcttcgatcgggctgcgtgatacctgggcgaaagtaggcgagctgggatcctacggtcattcagc

SEQ ID NO: 380 - DNA, 158 bp, synthetic construct
  misc_feature 1..158: note = Synthetic nucleic acid
  source 1..158: mol_type = other DNA
cagacgacggccagtgtcgacatggcaatacaacaccctgacatccagcctgctgttaaccataaacacttcttgcggcgatggttcctggctcttcgatcccctgatgccgacgtttctgtcgaaaaggtagccgacggatcctacggtcattcagc

SEQ ID NO: 381 - DNA, 158 bp, synthetic construct
  misc_feature 1..158: note = Synthetic nucleic acid
  source 1..158: mol_type = other DNA
cagacgacggccagtgtcgacatgtgttcaatttttggcgtattcgatatcaaaacagacgcagttgaaacacttcttgcggcgatggttcctggctcttcgatcgcggttggtgttcaccagtcggcgtataagaaaggatcctacggtcattcagc

SEQ ID NO: 382 - DNA, 158 bp, synthetic construct
  misc_feature 1..158: note = Synthetic nucleic acid
  source 1..158: mol_type = other DNA
cagacgacggccagtgtcgacatgattaaccgtatccgcgtagtcacgctgttggtaatgaacacttcttgcggcgatggttcctggctcttcgatctgcgaattgctgaacaagatccaaactgggaaacatttgatggatcctacggtcattcagc

SEQ ID NO: 383 - DNA, 158 bp, synthetic construct
  misc_feature 1..158: note = Synthetic nucleic acid
  source 1..158: mol_type = other DNA
cagacgacggccagtgtcgacatggatgatattgttaattctgtgccctcctggatgtttaccgcaattattaacacttcttgcggcgatggttcctggctcttcgatccaactcccgtcgaagaaaaagcagagtctggatcctacggtcattcagc

SEQ ID NO: 384 - DNA, 158 bp, synthetic construct
  misc_feature 1..158: note = Synthetic nucleic acid
  source 1..158: mol_type = other DNA
cagacgacggccagtgtcgacatgttggcacaactgaccatcagcaactttgctatcgttcgtaacacttcttgcggcgatggttcctggctcttcgatcatacactggcgaatgcgaaagaactgcttgcagcgagaggatcctacggtcattcagc

SEQ ID NO: 385 - DNA, 158 bp, synthetic construct
  misc_feature 1..158: note = Synthetic nucleic acid
  source 1..158: mol_type = other DNA
cagacgacggccagtgtcgacatgaatgcgactgcagcccagacaaaatctcttgagtgaacacttcttgcggcgatggttcctggctcttcgatcgcgctggtcattcgccagtggataaataacgatcatgagtccggatcctacggtcattcagc

SEQ ID NO: 386 - DNA, 158 bp, synthetic construct
  misc_feature 1..158: note = Synthetic nucleic acid
  source 1..158: mol_type = other DNA
cagacgacggccagtgtcgacatgattcttgagcgcgttgaaattgtgggttttcgcggtatcaaccgtttgtcgttaacacttcttgcggcgatggttcctggctcttcgatcctggcgcgcggtcgcgcggatcacggatcctacggtcattcagc

SEQ ID NO: 387 - DNA, 158 bp, synthetic construct
  misc_feature 1..158: note = Synthetic nucleic acid
  source 1..158: mol_type = other DNA
cagacgacggccagtgtcgacatgttgcagcttaacgagaataaacagtttgcatttttccaaagactggaacacttcttgcggcgatggttcctggctcttcgatctgacagctccattaaccctattgatcgtgtgggatcctacggtcattcagc

SEQ ID NO: 388 - DNA, 158 bp, synthetic construct
  misc_feature 1..158: note = Synthetic nucleic acid
  source 1..158: mol_type = other DNA
cagacgacggccagtgtcgacgtgttgaccccgttgacggccttcgcgggagtgcggttaacacttcttgcggcgatggttcctggctcttcgatcgcattgttaagcggatggcgggggaagaagcgcgatgaactgggatcctacggtcattcagc

SEQ ID NO: 389 - DNA, 158 bp, synthetic construct
  misc_feature 1..158: note = Synthetic nucleic acid
  source 1..158: mol_type = other DNA
cagacgacggccagtgtcgacatgaatctctggcaacaaaactacgatcccgccgggaatataacacttcttgcggcgatggttcctggctcttcgatcacgcttcaggcttatgtcttaacgtggatgattcctcatggatcctacggtcattcagc

SEQ ID NO: 390 - DNA, 158 bp, synthetic construct
  misc_feature 1..158: note = Synthetic nucleic acid
  source 1..158: mol_type = other DNA
cagacgacggccagtgtcgacatgactcatcttccccactggtggcaaaacggcgttataacacttcttgcggcgatggttcctggctcttcgatcaatttacggccttttgaggctgtctggtggttacagaagttgggatcctacggtcattcagc

SEQ ID NO: 391 - DNA, 158 bp, synthetic construct
  misc_feature 1..158: note = Synthetic nucleic acid
  source 1..158: mol_type = other DNA
cagacgacggccagtgtcgacatggaattttcgttttcacccaaacgtcttgttgttgctgtaacacttcttgcggcgatggttcctggctcttcgatcaaaaaatatccaccacgcgcgcagattaaatctgaccatggatcctacggtcattcagc

SEQ ID NO: 392 - DNA, 158 bp, synthetic construct
  misc_feature 1..158: note = Synthetic nucleic acid
  source 1..158: mol_type = other DNA
cagacgacggccagtgtcgacatggatcgtagacgatttattaaaggttcaatggctatggccgcaacacttcttgcggcgatggttcctggctcttcgatcaaacgtcagtatgttgacgaccgcgtgatgagtagaggatcctacggtcattcagc

SEQ ID NO: 393 - DNA, 158 bp, synthetic construct
  misc_feature 1..158: note = Synthetic nucleic acid
  source 1..158: mol_type = other DNA
cagacgacggccagtgtcgacatgttaaaacgtatcaaaattgtgaccagcttactgctggttttggcaacacttcttgcggcgatggttcctggctcttcgatcgcagatagcgaggagaactgggaaacatttcggggatcctacggtcattcagc

SEQ ID NO: 394 - DNA, 158 bp, synthetic construct
  misc_feature 1..158: note = Synthetic nucleic acid
  source 1..158: mol_type = other DNA
cagacgacggccagtgtcgacatgaaatcggtacgttaccttatcggcctcttcgcgtttattgaacacttcttgcggcgatggttcctggctcttcgatcggagcgtctggtgctgattcagtatcgtcccaaaaggggatcctacggtcattcagc

SEQ ID NO: 395 - DNA, 158 bp, synthetic construct
  misc_feature 1..158: note = Synthetic nucleic acid
  source 1..158: mol_type = other DNA
cagacgacggccagtgtcgacatgaaattattgcagcggggcgtggcgttagcgctaacacttcttgcggcgatggttcctggctcttcgatcgatgtgagtgtttatgaaccgaaaggtgaggtgagctggcagaccggatcctacggtcattcagc

SEQ ID NO: 396 - DNA, 158 bp, synthetic construct
  misc_feature 1..158: note = Synthetic nucleic acid
  source 1..158: mol_type = other DNA
cagacgacggccagtgtcgacatgttttgtgtgcaatgtgaacaaactatccgtactccggcaaacacttcttgcggcgatggttcctggctcttcgatcctgttgaagaagacatgaagcaactgttgagcgcgggatcctacggtcattcagccgc

SEQ ID NO: 397 - DNA, 158 bp, synthetic construct
  misc_feature 1..158: note = Synthetic nucleic acid
  source 1..158: mol_type = other DNA
cagacgacggccagtgtcgacatgaaaaacatcaatccaacgcagaccgctgcctggcagaacacttcttgcggcgatggttcctggctcttcgatcccaatggtctgattaaccgctataaagcgtggcgcggtgaaggatcctacggtcattcagc

SEQ ID NO: 398 - DNA, 158 bp, synthetic construct
  misc_feature 1..158: note = Synthetic nucleic acid
  source 1..158: mol_type = other DNA
cagacgacggccagtgtcgacatgaaaagagttctgacggcgcttgccgccacactccctttcgcagctaaaacacttcttgcggcgatggttcctggctcttcgatctttggcgttgagcaaggccgcgcgcatcccggatcctacggtcattcagc

SEQ ID NO: 399 - DNA, 158 bp, synthetic construct
  misc_feature 1..158: note = Synthetic nucleic acid
  source 1..158: mol_type = other DNA
cagacgacggccagtgtcgacatgctcaatcagaaaattcaaaaccctaatccagacgaactgatgatcgaaaacacttcttgcggcgatggttcctggctcttcgatcgtttaattggtttgtacggcgaaccatgtggatcctacggtcattcagc

SEQ ID NO: 400 - DNA, 158 bp, synthetic construct
  misc_feature 1..158: note = Synthetic nucleic acid
  source 1..158: mol_type = other DNA
cagacgacggccagtgtcgacatggaaatcttcttcaccatactgataatgaccctcgtggtctcgaacacttcttgcggcgatggttcctggctcttcgatctgcttgaagcgttgctaattgaggaaaatcaggcaggatcctacggtcattcagc

SEQ ID NO: 401 - DNA, 158 bp, synthetic construct
  misc_feature 1..158: note = Synthetic nucleic acid
  source 1..158: mol_type = other DNA
cagacgacggccagtgtcgacgtgaactggcgcagaatcgtctggctattggcaacacttcttgcggcgatggttcctggctcttcgatcgatgagaactatatcgaaacgctgacccgacaattattaatggaccggggatcctacggtcattcagc

SEQ ID NO: 402 - DNA, 158 bp, synthetic construct
  misc_feature 1..158: note = Synthetic nucleic acid
  source 1..158: mol_type = other DNA
cagacgacggccagtgtcgacatgaaagtgacattaacgtttaacgaacaacgtcgtgcggcaacacttcttgcggcgatggttcctggctcttcgatccggcgtttaacgcaggatgtctgtgaagagattgaaattggatcctacggtcattcagc

SEQ ID NO: 403 - DNA, 158 bp, synthetic construct
  misc_feature 1..158: note = Synthetic nucleic acid
  source 1..158: mol_type = other DNA
cagacgacggccagtgtcgacatggattcgcaacgcaatcttttagtcatcgctttgctgttcgtaacacttcttgcggcgatggttcctggctcttcgatccgtggcctgcatagccgcgagaagaaaaaatccttgggatcctacggtcattcagc

SEQ ID NO: 404 - DNA, 158 bp, synthetic construct
  misc_feature 1..158: note = Synthetic nucleic acid
  source 1..158: mol_type = other DNA
cagacgacggccagtgtcgacatggcagctaaagacgtaaaattcggtaacgacgctcgtgtgaaaatgctaacacttcttgcggcgatggttcctggctcttcgatcggcatgggtggcatgggcggcatgatgataggatcctacggtcattcagc

SEQ ID NO: 405 - DNA, 158 bp, synthetic construct
  misc_feature 1..158: note = Synthetic nucleic acid
  source 1..158: mol_type = other DNA
cagacgacggccagtgtcgacatgtcaaacaaaccctttatctaccaggcacctttcccgataacacttcttgcggcgatggttcctggctcttcgatccaaatcgtcaacaaacagtgcgcgaactgcactaaggatggatcctacggtcattcagc

SEQ ID NO: 406 - DNA, 158 bp, synthetic construct
  misc_feature 1..158: note = Synthetic nucleic acid
  source 1..158: mol_type = other DNA
cagacgacggccagtgtcgacatgtcaaacaaaccctttcattatcaggctccttttccactcaaaaaagataacacttcttgcggcgatggttcctggctcttcgatctcacacaatgcacccgctgtgtgaaagcaggatcctacggtcattcagc

SEQ ID NO: 407 - DNA, 158 bp, synthetic construct
  misc_feature 1..158: note = Synthetic nucleic acid
  source 1..158: mol_type = other DNA
cagacgacggccagtgtcgacatgagagttaacctactaataacgatgataattttcgcgctaatctggccaaacacttcttgcggcgatggttcctggctcttcgatcttcaggcgacgtggcgtaacattaacctaggatcctacggtcattcagc

SEQ ID NO: 408 - DNA, 158 bp, synthetic construct
  misc_feature 1..158: note = Synthetic nucleic acid
  source 1..158: mol_type = other DNA
cagacgacggccagtgtcgacatgcgccaggtattatcgtctcttttggtgattgctggaaacacttcttgcggcgatggttcctggctcttcgatcgggtgtatcgcgagaaacaggatgaggtgaaaaaaccaactggatcctacggtcattcagc

SEQ ID NO: 409 - DNA, 158 bp, synthetic construct
  misc_feature 1..158: note = Synthetic nucleic acid
  source 1..158: mol_type = other DNA
cagacgacggccagtgtcgacatggaacttcttgtacttgtctggcggcagtatcgctggccatttatcagtgtaacacttcttgcggcgatggttcctggctcttcgatccgtgatgccgttgcccggacggcacgtggatcctacggtcattcagc

SEQ ID NO: 410 - DNA, 158 bp, synthetic construct
  misc_feature 1..158: note = Synthetic nucleic acid
  source 1..158: mol_type = other DNA
cagacgacggccagtgtcgacatgtccagcttgattaataacgccatgagcggactgaacgaacacttcttgcggcgatggttcctggctcttcgatcggcaaacgcgatttttgatgcgctgattaacattcgccgaggatcctacggtcattcagc

SEQ ID NO: 411 - DNA, 158 bp, synthetic construct
  misc_feature 1..158: note = Synthetic nucleic acid
  source 1..158: mol_type = other DNA
cagacgacggccagtgtcgacatgttgaagcgcctactaaaaagaccctctttgaatttactcgcaacacttcttgcggcgatggttcctggctcttcgatcgatattctgcaaacttgcaggagagtgagtgaatccggatcctacggtcattcagc

SEQ ID NO: 412 - DNA, 158 bp, synthetic construct
  misc_feature 1..158: note = Synthetic nucleic acid
  source 1..158: mol_type = other DNA
cagacgacggccagtgtcgacatgaatacaactccctcacagcgattaggttttttgcatcacatcaaacacttcttgcggcgatggttcctggctcttcgatcagcgggtgaaccagttagtttcgctacggtgtccggatcctacggtcattcagc

SEQ ID NO: 413 - DNA, 158 bp, synthetic construct
  misc_feature 1..158: note = Synthetic nucleic acid
  source 1..158: mol_type = other DNA
cagacgacggccagtgtcgacatgacgccaggtgaagtacggcgcctatatttcatcattcgcacttttttaaaacacttcttgcggcgatggttcctggctcttcgatcgtttgtcggttggcgcaaaacacgccagggatcctacggtcattcagc

SEQ ID NO: 414 - DNA, 158 bp, synthetic construct
  misc_feature 1..158: note = Synthetic nucleic acid
  source 1..158: mol_type = other DNA
cagacgacggccagtgtcgacatggaatctaataatggggaagccaaaatccagaaagtgaagaactggtaacacttcttgcggcgatggttcctggctcttcgatcagatccagagccgaagagggcgaaacaatgtggatcctacggtcattcagc

SEQ ID NO: 415 - DNA, 158 bp, synthetic construct
  misc_feature 1..158: note = Synthetic nucleic acid
  source 1..158: mol_type = other DNA
cagacgacggccagtgtcgacatggcaatccacaatcgtgcaggccaacctgcaaacacttcttgcggcgatggttcctggctcttcgatcagaaagaagcggttgagattgttagcgaagttctgaaaaacgcgaggggatcctacggtcattcagc

SEQ ID NO: 416 - DNA, 158 bp, synthetic construct
  misc_feature 1..158: note = Synthetic nucleic acid
  source 1..158: mol_type = other DNA
cagacgacggccagtgtcgacatgacaacgaactatatttttgtgaccggcggggtcgtatcctctctaacacttcttgcggcgatggttcctggctcttcgatcgccagcgagttccagaaacgtcaggcgaaggggggatcctacggtcattcagc

SEQ ID NO: 417 - DNA, 158 bp, synthetic construct
  misc_feature 1..158: note = Synthetic nucleic acid
  source 1..158: mol_type = other DNA
cagacgacggccagtgtcgacatgaccaacatcaccaagagaagtttagtagcagctggcaacacttcttgcggcgatggttcctggctcttcgatcataatacctatacccggaatatgtacattgtgaagcactccggatcctacggtcattcagc

SEQ ID NO: 418 - DNA, 158 bp, synthetic construct
  misc_feature 1..158: note = Synthetic nucleic acid
  source 1..158: mol_type = other DNA
cagacgacggccagtgtcgacatgagacattcattgccctaccgcatgttacgcaaacgtccgataacacttcttgcggcgatggttcctggctcttcgatccagataccctgggacggggagaggtcgaacagactcggatcctacggtcattcagc

SEQ ID NO: 419 - DNA, 158 bp, synthetic construct
  misc_feature 1..158: note = Synthetic nucleic acid
  source 1..158: mol_type = other DNA
cagacgacggccagtgtcgacgtgttaacgctgcttcacctgctttctgccgtcgccaacacttcttgcggcgatggttcctggctcttcgatctgctggaacagccggatgaagatgaaggacgggacgagtatcagggatcctacggtcattcagc

SEQ ID NO: 420 - DNA, 158 bp, synthetic construct
  misc_feature 1..158: note = Synthetic nucleic acid
  source 1..158: mol_type = other DNA
cagacgacggccagtgtcgacatgaaaactcgcgactcgcaatcaagtgacgtgattatcattggaacacttcttgcggcgatggttcctggctcttcgatctgtggtctggagaaggagcagaaagatgcgcttattggatcctacggtcattcagc

SEQ ID NO: 421 - DNA, 158 bp, synthetic construct
  misc_feature 1..158: note = Synthetic nucleic acid
  source 1..158: mol_type = other DNA
cagacgacggccagtgtcgacgtgcactggcaaactcacaccgtttttaatcaacctataccattaaataacagcaaaacacttcttgcggcgatggttcctggctcttcgatcgcgacggggggagtgtgtgtgataggatcctacggtcattcagc

SEQ ID NO: 422 - DNA, 158 bp, synthetic construct
  misc_feature 1..158: note = Synthetic nucleic acid
  source 1..158: mol_type = other DNA
cagacgacggccagtgtcgacatgaaaattggaactgtggcaggcactaacgacagtacaaaacacttcttgcggcgatggttcctggctcttcgatctatgcctttgattagaaggcgcacaatgttacagctcccaggatcctacggtcattcagc

SEQ ID NO: 423 - DNA, 158 bp, synthetic construct
  misc_feature 1..158: note = Synthetic nucleic acid
  source 1..158: mol_type = other DNA
cagacgacggccagtgtcgacatgaatactctccctgaacattcatgtgacgtgttgattatcggtagcaacacttcttgcggcgatggttcctggctcttcgatctttcccccggcaatcattacataaacagaagtggatcctacggtcattcagc

SEQ ID NO: 424 - DNA, 158 bp, synthetic construct
  misc_feature 1..158: note = Synthetic nucleic acid
  source 1..158: mol_type = other DNA
cagacgacggccagtgtcgacatgcgcgttaacaatggtttgaccccgcaagaactcgaggcttatggtataacacttcttgcggcgatggttcctggctcttcgatcgcgctggtagcggctggtccgaaactgcacggatcctacggtcattcagc

SEQ ID NO: 425 - DNA, 158 bp, synthetic construct
  misc_feature 1..158: note = Synthetic nucleic acid
  source 1..158: mol_type = other DNA
cagacgacggccagtgtcgacatggagtcgaacgattcaggcggagtagccgcaacacttcttgcggcgatggttcctggctcttcgatcgagcggttaacccaattagttgatgagaaggtgagagaggtcgtacggggatcctacggtcattcagc

SEQ ID NO: 426 - DNA, 158 bp, synthetic construct
  misc_feature 1..158: note = Synthetic nucleic acid
  source 1..158: mol_type = other DNA
cagacgacggccagtgtcgacatgtttagacgaaatcttattacctctgccatcttattaatggcaccgttagcaacacttcttgcggcgatggttcctggctcttcgatcggtgcccaggctgaaatctggtggattggatcctacggtcattcagc

SEQ ID NO: 427 - DNA, 158 bp, synthetic construct
  misc_feature 1..158: note = Synthetic nucleic acid
  source 1..158: mol_type = other DNA
cagacgacggccagtgtcgacatgaagcactctgtttcagtcacgtgttgtgcgctaacacttcttgcggcgatggttcctggctcttcgatcgaagatgtggcgtacagtcggactatgtatattgtgaagcatcaaggatcctacggtcattcagc

SEQ ID NO: 428 - DNA, 158 bp, synthetic construct
  misc_feature 1..158: note = Synthetic nucleic acid
  source 1..158: mol_type = other DNA
cagacgacggccagtgtcgacatgagcattccattcacccgctggccggaagagtttgcccaacacttcttgcggcgatggttcctggctcttcgatcacaattacgtcagtggctggcgtcacgcgcatcagccacgggatcctacggtcattcagc

SEQ ID NO: 429 - DNA, 158 bp, synthetic construct
  misc_feature 1..158: note = Synthetic nucleic acid
  source 1..158: mol_type = other DNA
cagacgacggccagtgtcgacatggaaatcactaacccgatactcaccggcttcaacccggaaacacttcttgcggcgatggttcctggctcttcgatctacgcggacttcgactacttcacctacgagccggtcgtcggatcctacggtcattcagc

SEQ ID NO: 430 - DNA, 158 bp, synthetic construct
  misc_feature 1..158: note = Synthetic nucleic acid
  source 1..158: mol_type = other DNA
cagacgacggccagtgtcgacatggcaacgcgccgtcagccgttaattcccggaacacttcttgcggcgatggttcctggctcttcgatctttaccgtgattgaaaaactaccggggcgaaatgttaaaactgactcgggatcctacggtcattcagc

SEQ ID NO: 431 - DNA, 158 bp, synthetic construct
  misc_feature 1..158: note = Synthetic nucleic acid
  source 1..158: mol_type = other DNA
cagacgacggccagtgtcgacatgcgtatttccttgaaaaagtcagggatgctgaagcttggtaacacttcttgcggcgatggttcctggctcttcgatctaggcaaacatcacttcgaaaacgtctctatcgaactgggatcctacggtcattcagc

SEQ ID NO: 432 - DNA, 158 bp, synthetic construct
  misc_feature 1..158: note = Synthetic nucleic acid
  source 1..158: mol_type = other DNA
cagacgacggccagtgtcgacatgtatacgcgaaatttattatggctggtcagcctggtaagtgcaacacttcttgcggcgatggttcctggctcttcgatcgtctacagcaaagagttgtatatcaaggcacatggatcctacggtcattcagccgc

SEQ ID NO: 433 - DNA, 158 bp, synthetic construct
  misc_feature 1..158: note = Synthetic nucleic acid
  source 1..158: mol_type = other DNA
cagacgacggccagtgtcgacatgaaaaaaattgctattgtgggtgccgggcctacggggatctaaacacttcttgcggcgatggttcctggctcttcgatcgcatcccgtgctcgtcggcgtctttcgtttgataacggatcctacggtcattcagc

SEQ ID NO: 434 - DNA, 158 bp, synthetic construct
  misc_feature 1..158: note = Synthetic nucleic acid
  source 1..158: mol_type = other DNA
cagacgacggccagtgtcgacatgactgaacaggcaacaacaaccgatgaactggctttcacaaggccaacacttcttgcggcgatggttcctggctcttcgatcctgaccctgccaggctaccgcctgttagcgaggggatcctacggtcattcagc

SEQ ID NO: 435 - DNA, 158 bp, synthetic construct
  misc_feature 1..158: note = Synthetic nucleic acid
  source 1..158: mol_type = other DNA
cagacgacggccagtgtcgacatgtttaatcgtattcgaatttcgaccacgctgtttttaattttgattctctgcaacacttcttgcggcgatggttcctggctcttcgatctacaaattgcgccagtggtatcccttggatcctacggtcattcagc

SEQ ID NO: 436 - DNA, 158 bp, synthetic construct
  misc_feature 1..158: note = Synthetic nucleic acid
  source 1..158: mol_type = other DNA
cagacgacggccagtgtcgacatgcaaaaagcacaacggatcattaaaacctatcgtcgtaatcgaatgattaacacttcttgcggcgatggttcctggctcttcgatcatatcacgcccattatgccgttacgtcggggatcctacggtcattcagc

SEQ ID NO: 437 - DNA, 158 bp, synthetic construct
  misc_feature 1..158: note = Synthetic nucleic acid
  source 1..158: mol_type = other DNA
cagacgacggccagtgtcgacatgcgtaaaacagtggcttttggctttgtcggtaccgtactggattataacacttcttgcggcgatggttcctggctcttcgatcaagccgtgcaggatcagcacagctccagtcggggatcctacggtcattcagc

SEQ ID NO: 438 - DNA, 158 bp, synthetic construct
  misc_feature 1..158: note = Synthetic nucleic acid
  source 1..158: mol_type = other DNA
cagacgacggccagtgtcgacatgaaacctgtaaaaccacctcgtattaatggacgagtgccggtcaacacttcttgcggcgatggttcctggctcttcgatccgatgggttttgtcctgcctgaagcggctcatcatggatcctacggtcattcagc

SEQ ID NO: 439 - DNA, 158 bp, synthetic construct
  misc_feature 1..158: note = Synthetic nucleic acid
  source 1..158: mol_type = other DNA
cagacgacggccagtgtcgacatggctgacattctgctgctcgataatatcgactcttttacgtacaacctggcaaacacttcttgcggcgatggttcctggctcttcgatctcaccgcactggcggcacgagggtatggatcctacggtcattcagc

SEQ ID NO: 440 - DNA, 158 bp, synthetic construct
  misc_feature 1..158: note = Synthetic nucleic acid
  source 1..158: mol_type = other DNA
cagacgacggccagtgtcgacatgacggcgaaaacagcaccgaaagtcacgctgtaacacttcttgcggcgatggttcctggctcttcgatcagtaaaagatgaaatggccggtctgatgcatactgtccaggcacagggatcctacggtcattcagc

SEQ ID NO: 441 - DNA, 158 bp, synthetic construct
  misc_feature 1..158: note = Synthetic nucleic acid
  source 1..158: mol_type = other DNA
cagacgacggccagtgtcgacatggctcgactctttaccctttcagaatcaaagtactacctgatggaacacttcttgcggcgatggttcctggctcttcgatcgacgacgtcgttatggaaagcgcctgggttaagcggatcctacggtcattcagc

SEQ ID NO: 442 - DNA, 158 bp, synthetic construct
  misc_feature 1..158: note = Synthetic nucleic acid
  source 1..158: mol_type = other DNA
cagacgacggccagtgtcgacgtgttagtttccagtaacgtcaccatgcagttcggcaaacacttcttgcggcgatggttcctggctcttcgatccggtaattacgaagattacctgcgtagtaaagggatcgaggtgggatcctacggtcattcagc

SEQ ID NO: 443 - DNA, 158 bp, synthetic construct
  misc_feature 1..158: note = Synthetic nucleic acid
  source 1..158: mol_type = other DNA
cagacgacggccagtgtcgacatgaacaataacgatctggtcgcgaagctgtggaagctgtgaacacttcttgcggcgatggttcctggctcttcgatccagttgctggaagaagcgtttggtggggtgaaggaactaggatcctacggtcattcagc

SEQ ID NO: 444 - DNA, 158 bp, synthetic construct
  misc_feature 1..158: note = Synthetic nucleic acid
  source 1..158: mol_type = other DNA
cagacgacggccagtgtcgacatgacgcaaactctgttagcgattgaaaatttgtcggtgggttttaacacttcttgcggcgatggttcctggctcttcgatcaggagtatacgcgtcagctactggcgttgagccacggatcctacggtcattcagc

SEQ ID NO: 445 - DNA, 158 bp, synthetic construct
  misc_feature 1..158: note = Synthetic nucleic acid
  source 1..158: mol_type = other DNA
cagacgacggccagtgtcgacatgacgttgtctccttatttgcaagaggtggcgaagcgccgaacacttcttgcggcgatggttcctggctcttcgatctatccggacgttcagttccaccagacccgcgagcatgctggatcctacggtcattcagc

SEQ ID NO: 446 - DNA, 158 bp, synthetic construct
  misc_feature 1..158: note = Synthetic nucleic acid
  source 1..158: mol_type = other DNA
cagacgacggccagtgtcgacatgagtcatcgtgcacgacaccaattactggcgttgccgggcattatctttttaaacacttcttgcggcgatggttcctggctcttcgatccgcgggagttaacgcgcgggcaaggtggatcctacggtcattcagc

SEQ ID NO: 447 - DNA, 158 bp, synthetic construct
  misc_feature 1..158: note = Synthetic nucleic acid
  source 1..158: mol_type = other DNA
cagacgacggccagtgtcgacatggcacatccaccacggcttaatgacgacaaaccggttatctggacaacacttcttgcggcgatggttcctggctcttcgatccggacgacgttctggcggcggctgaaaagcggtggatcctacggtcattcagc

SEQ ID NO: 448 - DNA, 158 bp, synthetic construct
  misc_feature 1..158: note = Synthetic nucleic acid
  source 1..158: mol_type = other DNA
cagacgacggccagtgtcgacatgaatttaaccctcaaagaatcgcttgttacccgtagccgaacacttcttgcggcgatggttcctggctcttcgatcaaccatctcggaaccgatattttcgacccgaaacctccaggatcctacggtcattcagc

SEQ ID NO: 449 - DNA, 158 bp, synthetic construct
  misc_feature 1..158: note = Synthetic nucleic acid
  source 1..158: mol_type = other DNA
cagacgacggccagtgtcgacatggaatggattgccgatccgtctatctgggccgggttaatcaaacacttcttgcggcgatggttcctggctcttcgatcgctgcgtaaggatggcgagatggagtacgaggtgcctggatcctacggtcattcagc

SEQ ID NO: 450 - DNA, 158 bp, synthetic construct
  misc_feature 1..158: note = Synthetic nucleic acid
  source 1..158: mol_type = other DNA
cagacgacggccagtgtcgacatgagttattctgtgatgttcgctttactcctgctcacgccgaacacttcttgcggcgatggttcctggctcttcgatcgcaccgcatctgtttcggagaaacacagtgaacgtggcggatcctacggtcattcagc

SEQ ID NO: 451 - DNA, 158 bp, synthetic construct
  misc_feature 1..158: note = Synthetic nucleic acid
  source 1..158: mol_type = other DNA
cagacgacggccagtgtcgacatgacggaaaacattcataagcatcgcatcctcattctggacttcggttaacacttcttgcggcgatggttcctggctcttcgatccaagccgccagctaccattgagtgggaattcggatcctacggtcattcagc

SEQ ID NO: 452 - DNA, 158 bp, synthetic construct
  misc_feature 1..158: note = Synthetic nucleic acid
  source 1..158: mol_type = other DNA
cagacgacggccagtgtcgacatgctctccacactccgccgcactctatttgcgctaacacttcttgcggcgatggttcctggctcttcgatcgccaccgaaattccgttcgaacagattaaaccggtgaaacctcagggatcctacggtcattcagc

SEQ ID NO: 453 - DNA, 158 bp, synthetic construct
  misc_feature 1..158: note = Synthetic nucleic acid
  source 1..158: mol_type = other DNA
cagacgacggccagtgtcgacatgagccagcaagtcattattttcgataccacattgcgcgaaacacttcttgcggcgatggttcctggctcttcgatcaaagctcaacacaacgaaaacaacaaggaaaccgtgagaggatcctacggtcattcagc

SEQ ID NO: 454 - DNA, 158 bp, synthetic construct
  misc_feature 1..158: note = Synthetic nucleic acid
  source 1..158: mol_type = other DNA
cagacgacggccagtgtcgacatgagggacattgtggaccctgtattctctatcggtatctcatcattataacacttcttgcggcgatggttcctggctcttcgatcgttagatgatgctgtggagcgctcatcagaaggatcctacggtcattcagc

SEQ ID NO: 455 - DNA, 158 bp, synthetic construct
  misc_feature 1..158: note = Synthetic nucleic acid
  source 1..158: mol_type = other DNA
cagacgacggccagtgtcgacatggccaacatcgaaatcagacaagaaacgccaactgcgttttatataaaaaacacttcttgcggcgatggttcctggctcttcgatccggtgtttaacccggcaccggtgacctgtggatcctacggtcattcagc

SEQ ID NO: 456 - DNA, 158 bp, synthetic construct
  misc_feature 1..158: note = Synthetic nucleic acid
  source 1..158: mol_type = other DNA
cagacgacggccagtgtcgacatgttagatatagtcgaactgtcgcgcttacagtttgccttgaccgcaacacttcttgcggcgatggttcctggctcttcgatccagtcttccacgactactcagccggcacgccgaggatcctacggtcattcagc

SEQ ID NO: 457 - DNA, 158 bp, synthetic construct
  misc_feature 1..158: note = Synthetic nucleic acid
  source 1..158: mol_type = other DNA
cagacgacggccagtgtcgacatgctcgacacaaatatgaaaactcaactcaaggcttaccttgagaaattaacacttcttgcggcgatggttcctggctcttcgatcgactacctgattcgcaccaaaactgcaccaggatcctacggtcattcagc

SEQ ID NO: 458 - DNA, 158 bp, synthetic construct
  misc_feature 1..158: note = Synthetic nucleic acid
  source 1..158: mol_type = other DNA
cagacgacggccagtgtcgacatggaattcttaatggacccctcaatttgggcggggctaaacacttcttgcggcgatggttcctggctcttcgatcgcattgttaaagagcaaccggcgcacgatgaagatgagcctggatcctacggtcattcagc

SEQ ID NO: 459 - DNA, 158 bp, synthetic construct
  misc_feature 1..158: note = Synthetic nucleic acid
  source 1..158: mol_type = other DNA
cagacgacggccagtgtcgacatgttcatacgcgctcccaattttggacgtaagctcctgcttaaacacttcttgcggcgatggttcctggctcttcgatctcgctggctaaagaaaccgtatacgccgcagtggttgggatcctacggtcattcagc

SEQ ID NO: 460 - DNA, 158 bp, synthetic construct
  misc_feature 1..158: note = Synthetic nucleic acid
  source 1..158: mol_type = other DNA
cagacgacggccagtgtcgacttgatcccggacgtatcacaggcgctggcctggctgaacacttcttgcggcgatggttcctggctcttcgatcctgataccgaaccgtttgcggtgtggctggaaaaacacgccgtaggatcctacggtcattcagc

SEQ ID NO: 461 - DNA, 158 bp, synthetic construct
  misc_feature 1..158: note = Synthetic nucleic acid
  source 1..158: mol_type = other DNA
cagacgacggccagtgtcgacatggatatcattggcggacaacatctacgtcaaatgtgggaaacacttcttgcggcgatggttcctggctcttcgatcaattgctcggggaaaataattagaaagaatctgaaaccaggatcctacggtcattcagc

SEQ ID NO: 462 - DNA, 158 bp, synthetic construct
  misc_feature 1..158: note = Synthetic nucleic acid
  source 1..158: mol_type = other DNA
cagacgacggccagtgtcgacatgaagagatcgatatcgtttcgtcccacattgctcgcaacacttcttgcggcgatggttcctggctcttcgatcatgctggaacaggtcttcaatatcaataccatgagtaaacggggatcctacggtcattcagc

SEQ ID NO: 463 - DNA, 158 bp, synthetic construct
  misc_feature 1..158: note = Synthetic nucleic acid
  source 1..158: mol_type = other DNA
cagacgacggccagtgtcgacatgcaacgtcgtgatttcttaaaatattccgtcgcgctaacacttcttgcggcgatggttcctggctcttcgatcgagcatgaagatacggggatgatgttagggtttacggtaacgggatcctacggtcattcagc

SEQ ID NO: 464 - DNA, 158 bp, synthetic construct
  misc_feature 1..158: note = Synthetic nucleic acid
  source 1..158: mol_type = other DNA
cagacgacggccagtgtcgacatgcccacttctcatgaaaatgcactgcaacaacgttgcaacacttcttgcggcgatggttcctggctcttcgatcgcgtgataagccatgaacagcagatgcgctttagtcagatgggatcctacggtcattcagc

SEQ ID NO: 465 - DNA, 158 bp, synthetic construct
  misc_feature 1..158: note = Synthetic nucleic acid
  source 1..158: mol_type = other DNA
cagacgacggccagtgtcgacgtgagaacacgacatctggtcggccttatttcgggagtaaacacttcttgcggcgatggttcctggctcttcgatccgaaagaagatttcttacgctgggccgagcaacatttgcttggatcctacggtcattcagc

SEQ ID NO: 466 - DNA, 158 bp, synthetic construct
  misc_feature 1..158: note = Synthetic nucleic acid
  source 1..158: mol_type = other DNA
cagacgacggccagtgtcgacatgacggaccatacaatgaagaaaaaccccgtaagtataccacaaacacttcttgcggcgatggttcctggctcttcgatcaaaaaccatgatgaatcgagtaattccgctccctgcggatcctacggtcattcagc

SEQ ID NO: 467 - DNA, 158 bp, synthetic construct
  misc_feature 1..158: note = Synthetic nucleic acid
  source 1..158: mol_type = other DNA
cagacgacggccagtgtcgacatgaaaatccgttcacaagtcggcatggtgcttaacctcgacaaatgtataacacttcttgcggcgatggttcctggctcttcgatcgaagtgcgcgacaaagcggagggcgaacatggatcctacggtcattcagc

SEQ ID NO: 468 - DNA, 158 bp, synthetic construct
  misc_feature 1..158: note = Synthetic nucleic acid
  source 1..158: mol_type = other DNA
cagacgacggccagtgtcgacatggatgtcattaaaaagaaacattggtggcaaagcgacgcaacacttcttgcggcgatggttcctggctcttcgatcatagtgaacctgaaagccacgcgaatgaagtttgatcatggatcctacggtcattcagc

SEQ ID NO: 469 - DNA, 158 bp, synthetic construct
  misc_feature 1..158: note = Synthetic nucleic acid
  source 1..158: mol_type = other DNA
cagacgacggccagtgtcgacatggctgactcgcaacccctgtccggtgctccgaacacttcttgcggcgatggttcctggctcttcgatcacgacgaaaccaataacccggcgttcaggttctttttggcgggtgtaggatcctacggtcattcagc

SEQ ID NO: 470 - DNA, 158 bp, synthetic construct
  misc_feature 1..158: note = Synthetic nucleic acid
  source 1..158: mol_type = other DNA
cagacgacggccagtgtcgacatgtgggatgtcattgatttatcgcgctggcagtttgctctgacaacacttcttgcggcgatggttcctggctcttcgatcatgcagagtgaacaaccgacgcagcaacagggggagggatcctacggtcattcagc

SEQ ID NO: 471 - DNA, 158 bp, synthetic construct
  misc_feature 1..158: note = Synthetic nucleic acid
  source 1..158: mol_type = other DNA
cagacgacggccagtgtcgacatgttggtttctaaaaaacctatggtactggtgattctggatggctatggaacacttcttgcggcgatggttcctggctcttcgatcactggtaagccgctgttcatcgtggaactgggatcctacggtcattcagc

SEQ ID NO: 472 - DNA, 158 bp, synthetic construct
  misc_feature 1..158: note = Synthetic nucleic acid
  source 1..158: mol_type = other DNA
cagacgacggccagtgtcgacatgcaactgaattccaccgaaatcagcgaactgatcaagcaaacacttcttgcggcgatggttcctggctcttcgatcggcatcctcgattccttcaaagcaacccaatcctggtatggatcctacggtcattcagc

SEQ ID NO: 473 - DNA, 158 bp, synthetic construct
  misc_feature 1..158: note = Synthetic nucleic acid
  source 1..158: mol_type = other DNA
cagacgacggccagtgtcgacatgccaatacacgataaatcccctcgtccgcaggaaacacttcttgcggcgatggttcctggctcttcgatccggttgaaaattgaagaagaaagtacaccagaaatcgccgctttgggatcctacggtcattcagc

SEQ ID NO: 474 - DNA, 158 bp, synthetic construct
  misc_feature 1..158: note = Synthetic nucleic acid
  source 1..158: mol_type = other DNA
cagacgacggccagtgtcgacatgccttatctacttgaaatgaagaacattaccaaaaccttcggcagtaacacttcttgcggcgatggttcctggctcttcgatcgcgaacatcatgtcgaaaagcaatccgtcaagggatcctacggtcattcagc

SEQ ID NO: 475 - DNA, 158 bp, synthetic construct
  misc_feature 1..158: note = Synthetic nucleic acid
  source 1..158: mol_type = other DNA
cagacgacggccagtgtcgacatgcgtctggaagtcttttgtgaagaccgactcggtaacacttcttgcggcgatggttcctggctcttcgatcagttgcgggaatatggtctgagtcagaagaagaacgaagagttgggatcctacggtcattcagc

SEQ ID NO: 476 - DNA, 158 bp, synthetic construct
  misc_feature 1..158: note = Synthetic nucleic acid
  source 1..158: mol_type = other DNA
cagacgacggccagtgtcgacatggagatctcctggggccgcgcgctatggcgaacacttcttgcggcgatggttcctggctcttcgatccctgtaaccgaatggtttatgcaaatgggctggatagcaacgcttggcggatcctacggtcattcagc

SEQ ID NO: 477 - DNA, 158 bp, synthetic construct
  misc_feature 1..158: note = Synthetic nucleic acid
  source 1..158: mol_type = other DNA
cagacgacggccagtgtcgacatgaaaattcgttcacaagtcggcatggtgctgaatctcgataagtgaacacttcttgcggcgatggttcctggctcttcgatcgatgtgaccagcaaaacggagccgcatccacctggatcctacggtcattcagc

SEQ ID NO: 478 - DNA, 158 bp, synthetic construct
  misc_feature 1..158: note = Synthetic nucleic acid
  source 1..158: mol_type = other DNA
cagacgacggccagtgtcgacatgaccaataatcccccttcagcacagattaagcccggcgaaacacttcttgcggcgatggttcctggctcttcgatcctggtgagctactcggataaaccgttggggctgttcgcaggatcctacggtcattcagc

SEQ ID NO: 479 - DNA, 158 bp, synthetic construct
  misc_feature 1..158: note = Synthetic nucleic acid
  source 1..158: mol_type = other DNA
cagacgacggccagtgtcgacatgcaacaacctgtagttcgcgttggcgaatgaacacttcttgcggcgatggttcctggctcttcgatcgttccttatgttgtaccttatctcgacaaatttcttgcttcagaaattggatcctacggtcattcagc

SEQ ID NO: 480 - DNA, 158 bp, synthetic construct
  misc_feature 1..158: note = Synthetic nucleic acid
  source 1..158: mol_type = other DNA
cagacgacggccagtgtcgacatgcaacagcaaaaaccgctggaaggcgcgcaactggtcattatgacgattgcaacacttcttgcggcgatggttcctggctcttcgatcggtggcggcggaggcggtgcgcactgcggatcctacggtcattcagc

SEQ ID NO: 481 - DNA, 158 bp, synthetic construct
  misc_feature 1..158: note = Synthetic nucleic acid
  source 1..158: mol_type = other DNA
cagacgacggccagtgtcgacatggcaagagctgtacaccgtagtgggttagtggcgctgaacacttcttgcggcgatggttcctggctcttcgatccagacaccggcttcagctttgaagacgcggatttgcaagtaggatcctacggtcattcagc

SEQ ID NO: 482 - DNA, 158 bp, synthetic construct
  misc_feature 1..158: note = Synthetic nucleic acid
  source 1..158: mol_type = other DNA
cagacgacggccagtgtcgacatggcaatcactaaatcaactccggcaccattaaccggtgggacgttataacacttcttgcggcgatggttcctggctcttcgatcaccgccgtttacagcgaaaggcgttgggcgtggatcctacggtcattcagc

SEQ ID NO: 483 - DNA, 158 bp, synthetic construct
  misc_feature 1..158: note = Synthetic nucleic acid
  source 1..158: mol_type = other DNA
cagacgacggccagtgtcgacatggcttttgcctcattaattgaacgccagcgcattcgcaacacttcttgcggcgatggttcctggctcttcgatcttgctgctgtgttgatgagtctgcgtcagcgacgtaaatttggatcctacggtcattcagc

SEQ ID NO: 484 - DNA, 158 bp, synthetic construct
  misc_feature 1..158: note = Synthetic nucleic acid
  source 1..158: mol_type = other DNA
cagacgacggccagtgtcgacatgaatttattaaaatcgctggccgccgtcagctcgatgaccataacacttcttgcggcgatggttcctggctcttcgatcttcaaagttaaagaatttgcccgccggacggtgctgggatcctacggtcattcagc

SEQ ID NO: 485 - DNA, 158 bp, synthetic construct
  misc_feature 1..158: note = Synthetic nucleic acid
  source 1..158: mol_type = other DNA
cagacgacggccagtgtcgacatgatgaaaatgcgttggttgagtgctgcagtaatgttaaccaacacttcttgcggcgatggttcctggctcttcgatcgtgaaacctggagctaccagttacctgccaatgaacaaggatcctacggtcattcagc

SEQ ID NO: 486 - DNA, 158 bp, synthetic construct
  misc_feature 1..158: note = Synthetic nucleic acid
  source 1..158: mol_type = other DNA
cagacgacggccagtgtcgacatgcaaacgagtgatacccgcgcgttaccgctactttgcgcaacacttcttgcggcgatggttcctggctcttcgatcgccttcggcgatagtcagcgtcaggaggcgtcatgcttgggatcctacggtcattcagc

SEQ ID NO: 487 - DNA, 158 bp, synthetic construct
  misc_feature 1..158: note = Synthetic nucleic acid
  source 1..158: mol_type = other DNA
cagacgacggccagtgtcgacatggctacaccgttacggtacgcattaatctttttgctgtgaacacttcttgcggcgatggttcctggctcttcgatcgcaaaatgggtaggttatgtcagacaaggactccgcttcggatcctacggtcattcagc

SEQ ID NO: 488 - DNA, 158 bp, synthetic construct
  misc_feature 1..158: note = Synthetic nucleic acid
  source 1..158: mol_type = other DNA
cagacgacggccagtgtcgacatggctacatcagtacagacaggtaaagctaagcagctcaaacacttcttgcggcgatggttcctggctcttcgatcttcaccacactatattgtgatgaatgacaagaaacacgtcggatcctacggtcattcagc

SEQ ID NO: 489 - DNA, 158 bp, synthetic construct
  misc_feature 1..158: note = Synthetic nucleic acid
  source 1..158: mol_type = other DNA
cagacgacggccagtgtcgacatgacgcagaaaattgaacaatctcaacgacaagaacgggtagaacacttcttgcggcgatggttcctggctcttcgatcctcggtgatcgatgttgtgcatcaggtgaaggaaggtggatcctacggtcattcagc

SEQ ID NO: 490 - DNA, 158 bp, synthetic construct
  misc_feature 1..158: note = Synthetic nucleic acid
  source 1..158: mol_type = other DNA
cagacgacggccagtgtcgacatgcgaattggcataccaagagaacggttaaccaatgaaaccaacacttcttgcggcgatggttcctggctcttcgatctgactcagcgcatgctgaaaatgttccgcaaaaatacgggatcctacggtcattcagc

SEQ ID NO: 491 - DNA, 158 bp, synthetic construct
  misc_feature 1..158: note = Synthetic nucleic acid
  source 1..158: mol_type = other DNA
cagacgacggccagtgtcgacatggccacgccatatatatcgatggcggggatcgaacacttcttgcggcgatggttcctggctcttcgatccatgagcgaagaggagattatggcatgggctttaccacaagaggtgggatcctacggtcattcagc

SEQ ID NO: 492 - DNA, 158 bp, synthetic construct
  misc_feature 1..158: note = Synthetic nucleic acid
  source 1..158: mol_type = other DNA
cagacgacggccagtgtcgacatggcgacgatcgattctatgaataaggacaccacacgtttgagaacacttcttgcggcgatggttcctggctcttcgatcctggaacgttgcccgccaagaatgggaaatctgacgggatcctacggtcattcagc

SEQ ID NO: 493 - DNA, 158 bp, synthetic construct
  misc_feature 1..158: note = Synthetic nucleic acid
  source 1..158: mol_type = other DNA
cagacgacggccagtgtcgacatgttacagatagtcggcgcgctgatcctgctaacacttcttgcggcgatggttcctggctcttcgatcgaaaccatgaggaataagatccgcgaaggtaaagtagaggagagaggcggatcctacggtcattcagc

SEQ ID NO: 494 - DNA, 158 bp, synthetic construct
  misc_feature 1..158: note = Synthetic nucleic acid
  source 1..158: mol_type = other DNA
cagacgacggccagtgtcgacatgttactaccctggctaatattaattccctttattggcggcttcctaacacttcttgcggcgatggttcctggctcttcgatctttgttaattccgttactactacaaggccgttgggatcctacggtcattcagc

SEQ ID NO: 495 - DNA, 158 bp, synthetic construct
  misc_feature 1..158: note = Synthetic nucleic acid
  source 1..158: mol_type = other DNA
cagacgacggccagtgtcgacatgagtatgtcatccataccgtcgtcctcccaatccgggaaaacacttcttgcggcgatggttcctggctcttcgatcctgccgataggtccgggtatttacccacgtttgtctacaggatcctacggtcattcagc

SEQ ID NO: 496 - DNA, 158 bp, synthetic construct
  misc_feature 1..158: note = Synthetic nucleic acid
  source 1..158: mol_type = other DNA
cagacgacggccagtgtcgacatgcgcaatacactcatacccatcctcgttgcgatataacacttcttgcggcgatggttcctggctcttcgatcaattatcctttctaaaccgaaggtgaaggttgtggttgagggcggatcctacggtcattcagc

SEQ ID NO: 497 - DNA, 158 bp, synthetic construct
  misc_feature 1..158: note = Synthetic nucleic acid
  source 1..158: mol_type = other DNA
cagacgacggccagtgtcgacatggtcagctcaacgactccgtcctccggggaatacttaacacttcttgcggcgatggttcctggctcttcgatcacgcaaaacgaaattctgcgtcttgcgtctttgcaccttaacggatcctacggtcattcagc

SEQ ID NO: 498 - DNA, 158 bp, synthetic construct
  misc_feature 1..158: note = Synthetic nucleic acid
  source 1..158: mol_type = other DNA
cagacgacggccagtgtcgacatgtcactgtcaattgttcatacccgcgcagccctgaacacttcttgcggcgatggttcctggctcttcgatccgattgaccgtttgctcatccatctgcagaaactactgacaaagggatcctacggtcattcagc

SEQ ID NO: 499 - DNA, 158 bp, synthetic construct
  misc_feature 1..158: note = Synthetic nucleic acid
  source 1..158: mol_type = other DNA
cagacgacggccagtgtcgacatgtccgcaatcactgaatccaaaccaacaagaagatgggcaataacacttcttgcggcgatggttcctggctcttcgatcgtagtgatcggcgctcagttgatgggctaccaccgtggatcctacggtcattcagc

SEQ ID NO: 500 - DNA, 158 bp, synthetic construct
  misc_feature 1..158: note = Synthetic nucleic acid
  source 1..158: mol_type = other DNA
cagacgacggccagtgtcgacatgtcttctcatccgtatgtcacccagcaaaataccccgctggcaacacttcttgcggcgatggttcctggctcttcgatcagccgactggaagacgcggtgacggtactgcattgcggatcctacggtcattcagc

SEQ ID NO: 501 - DNA, 158 bp, synthetic construct
  misc_feature 1..158: note = Synthetic nucleic acid
  source 1..158: mol_type = other DNA
cagacgacggccagtgtcgacatggcacagattgatttccgaaaaaaaataaactggcatcgtcgttaaacacttcttgcggcgatggttcctggctcttcgatcgaataccgacgtctgatggccgtagaacaagacggatcctacggtcattcagc

SEQ ID NO: 502 - DNA, 158 bp, synthetic construct
  misc_feature 1..158: note = Synthetic nucleic acid
  source 1..158: mol_type = other DNA
cagacgacggccagtgtcgacatgtctgaacaacacgcacagggcgctgacgcggtagtaacacttcttgcggcgatggttcctggctcttcgatccgcgacgttattctgttcccggcgatgcgtccggtaaaagaaggatcctacggtcattcagc

SEQ ID NO: 503 - DNA, 158 bp, synthetic construct
  misc_feature 1..158: note = Synthetic nucleic acid
  source 1..158: mol_type = other DNA
cagacgacggccagtgtcgacatgtctgaacaagaaacacggggagccaatgaggctattgattttaacgataacacttcttgcggcgatggttcctggctcttcgatctcttcccggcgatgcgcccacagaaacgtggatcctacggtcattcagc

SEQ ID NO: 504 - DNA, 158 bp, synthetic construct
  misc_feature 1..158: note = Synthetic nucleic acid
  source 1..158: mol_type = other DNA
cagacgacggccagtgtcgacatgtgcggtattgtcggtatcgccggtgttatgcaacacttcttgcggcgatggttcctggctcttcgatcacgtcagaacgaagtggaaaatctcgaaatgcataacgaaggaaccggatcctacggtcattcagc

SEQ ID NO: 505 - DNA, 158 bp, synthetic construct
  misc_feature 1..158: note = Synthetic nucleic acid
  source 1..158: mol_type = other DNA
cagacgacggccagtgtcgacatgaagaatgaaaagagaaaaacgggaatagaaccgaaggttttctttccgaacacttcttgcggcgatggttcctggctcttcgatcaagacgcgaaacagaactggaaagattcaggatcctacggtcattcagc

SEQ ID NO: 506 - DNA, 158 bp, synthetic construct
  misc_feature 1..158: note = Synthetic nucleic acid
  source 1..158: mol_type = other DNA
cagacgacggccagtgtcgacatgagtttttccgttgatgtgctggcgaatatcgccatcgaattaacacttcttgcggcgatggttcctggctcttcgatccatcggctggcgaaacgtctgggattgaaggatccaggatcctacggtcattcagc

SEQ ID NO: 507 - DNA, 158 bp, synthetic construct
  misc_feature 1..158: note = Synthetic nucleic acid
  source 1..158: mol_type = other DNA
cagacgacggccagtgtcgacatgcaacagtctaccccgtatctctcatttcgcggcatcggtaaaaaacacttcttgcggcgatggttcctggctcttcgatctgcgatgcctaaagtcagccaggctgttgccatcggatcctacggtcattcagc

SEQ ID NO: 508 - DNA, 158 bp, synthetic construct
  misc_feature 1..158: note = Synthetic nucleic acid
  source 1..158: mol_type = other DNA
cagacgacggccagtgtcgacatggagtttagtgtaaaaagcggtagcccggagaaacagcggaaacacttcttgcggcgatggttcctggctcttcgatccctgttaaaccgcgctgggtttaacggcgaagagtcaggatcctacggtcattcagc

SEQ ID NO: 509 - DNA, 158 bp, synthetic construct
  misc_feature 1..158: note = Synthetic nucleic acid
  source 1..158: mol_type = other DNA
cagacgacggccagtgtcgacatgttcacggcaacagaggcagtcccggtagcaaaagtaacacttcttgcggcgatggttcctggctcttcgatcaatgtggatgagctgatgtccgccattctgtctgtgcacccgggatcctacggtcattcagc

SEQ ID NO: 510 - DNA, 158 bp, synthetic construct
  misc_feature 1..158: note = Synthetic nucleic acid
  source 1..158: mol_type = other DNA
cagacgacggccagtgtcgacatgaataaatcgctggtagcggtaggcgtcattgttgcgctaggcaacacttcttgcggcgatggttcctggctcttcgatcacgttccggctgtaccggcaattccgcagcagtcgggatcctacggtcattcagc

SEQ ID NO: 511 - DNA, 158 bp, synthetic construct
  misc_feature 1..158: note = Synthetic nucleic acid
  source 1..158: mol_type = other DNA
cagacgacggccagtgtcgacatgactgaaaaaaaatatatcgttgcgctcgaccagggcaccaccagctaacacttcttgcggcgatggttcctggctcttcgatccgcgatggcgtgggaagaacacgacgaaccaggatcctacggtcattcagc

SEQ ID NO: 512 - DNA, 158 bp, synthetic construct
  misc_feature 1..158: note = Synthetic nucleic acid
  source 1..158: mol_type = other DNA
cagacgacggccagtgtcgacatggctattagcacaccgatgttggtgacattttgtgtctatatctttggcataacacttcttgcggcgatggttcctggctcttcgatcccgccgtcacggttgcaggaaagcccgggatcctacggtcattcagc

SEQ ID NO: 513 - DNA, 158 bp, synthetic construct
  misc_feature 1..158: note = Synthetic nucleic acid
  source 1..158: mol_type = other DNA
cagacgacggccagtgtcgacatggaaaccaaagatctgattgtgatagggggcggcatcaatggtaacacttcttgcggcgatggttcctggctcttcgatcagtatacgcagcagaggttatcgctggcgtcgattggatcctacggtcattcagc

SEQ ID NO: 514 - DNA, 158 bp, synthetic construct
  misc_feature 1..158: note = Synthetic nucleic acid
  source 1..158: mol_type = other DNA
cagacgacggccagtgtcgacatggaagcattacttcagcttaaaggcatcgataaagccttcccgaacacttcttgcggcgatggttcctggctcttcgatcctgtgggcaagcttaatcgcgtgaatcaggagtccggatcctacggtcattcagc

SEQ ID NO: 515 - DNA, 158 bp, synthetic construct
  misc_feature 1..158: note = Synthetic nucleic acid
  source 1..158: mol_type = other DNA
cagacgacggccagtgtcgacatgaagacgttgttctcccgcttaattaccgttattgcctgcttttttataacacttcttgcggcgatggttcctggctcttcgatcagcgtttctctacctcaacgctatgtcctaggatcctacggtcattcagc

SEQ ID NO: 516 - DNA, 158 bp, synthetic construct
  misc_feature 1..158: note = Synthetic nucleic acid
  source 1..158: mol_type = other DNA
cagacgacggccagtgtcgacatgacgaccgaccaacaccaggagatcctccgcaccgaaggattaaaacacttcttgcggcgatggttcctggctcttcgatccgttccggcgatcatgaacgccattgcggcgccgggatcctacggtcattcagc

SEQ ID NO: 517 - DNA, 158 bp, synthetic construct
  misc_feature 1..158: note = Synthetic nucleic acid
  source 1..158: mol_type = other DNA
cagacgacggccagtgtcgacatgacgatttttgataattatgaagtgtggtttgtcattggcagccaaacacttcttgcggcgatggttcctggctcttcgatctggaacgaagtgtattacgggtttcgtcgcgatggatcctacggtcattcagc

SEQ ID NO: 518 - DNA, 158 bp, synthetic construct
  misc_feature 1..158: note = Synthetic nucleic acid
  source 1..158: mol_type = other DNA
cagacgacggccagtgtcgacatgagtgaacccctgttaattgcccgcacgccggacacagaaaacacttcttgcggcgatggttcctggctcttcgatcggatgttggggagtttgctgggggggagaagaaggataggatcctacggtcattcagc

SEQ ID NO: 519 - DNA, 158 bp, synthetic construct
  misc_feature 1..158: note = Synthetic nucleic acid
  source 1..158: mol_type = other DNA
cagacgacggccagtgtcgacatgcctcacacgataaaaaagatgagtctgataggactcatattgatgatctttacttaacacttcttgcggcgatggttcctggctcttcgatctccgcagtgggcggtggaaactggatcctacggtcattcagc

SEQ ID NO: 520 - DNA, 158 bp, synthetic construct
  misc_feature 1..158: note = Synthetic nucleic acid
  source 1..158: mol_type = other DNA
cagacgacggccagtgtcgacatgctgaaaaggaaaaaagtaaaaccgattacccttcgtgatgtcacaacacttcttgcggcgatggttcctggctcttcgatcctggtgcagcaacatccgcgaattgatgaagttggatcctacggtcattcagc

SEQ ID NO: 521 - DNA, 158 bp, synthetic construct
  misc_feature 1..158: note = Synthetic nucleic acid
  source 1..158: mol_type = other DNA
cagacgacggccagtgtcgacgtgtccactgcaaaccaaaaaccaactgaaagcgtcagtttgaacgctttaacacttcttgcggcgatggttcctggctcttcgatcgacaaagcggcgaaagcagccgtagcgtatggatcctacggtcattcagc

SEQ ID NO: 522 - DNA, 158 bp, synthetic construct
  misc_feature 1..158: note = Synthetic nucleic acid
  source 1..158: mol_type = other DNA
cagacgacggccagtgtcgacatgacagagccgcatgtagcagtattaagccaggtccaaaacacttcttgcggcgatggttcctggctcttcgatcacggttggtgtgaaactaagtcggtgtgtgtacggtatcgaggatcctacggtcattcagc

SEQ ID NO: 523 - DNA, 158 bp, synthetic construct
  misc_feature 1..158: note = Synthetic nucleic acid
  source 1..158: mol_type = other DNA
cagacgacggccagtgtcgacatgagtaaacacgacaccgacacttcagatcaacacgcaacacttcttgcggcgatggttcctggctcttcgatcgaaaaacaggaaattgtgtttaagcctgaaacggcgagtgatggatcctacggtcattcagc

SEQ ID NO: 524 - DNA, 158 bp, synthetic construct
  misc_feature 1..158: note = Synthetic nucleic acid
  source 1..158: mol_type = other DNA
cagacgacggccagtgtcgacatgctacatttgtttgctggcctggatttgcataccgggctgttattattaacacttcttgcggcgatggttcctggctcttcgatcctgtactggctctccttgcagttcctgaccggatcctacggtcattcagc

SEQ ID NO: 525 - DNA, 158 bp, synthetic construct
  misc_feature 1..158: note = Synthetic nucleic acid
  source 1..158: mol_type = other DNA
cagacgacggccagtgtcgacatgacgcaatactggctggggttagattgtggcggtagctaacacttcttgcggcgatggttcctggctcttcgatctcagggctttcacgcccgcattaaggagcacacattagctggatcctacggtcattcagc

SEQ ID NO: 526 - DNA, 158 bp, synthetic construct
  misc_feature 1..158: note = Synthetic nucleic acid
  source 1..158: mol_type = other DNA
cagacgacggccagtgtcgacatgcagggcacaaaaattcgacttttagcgggcggtttaacacttcttgcggcgatggttcctggctcttcgatcgacgtacatcctgaagtgacggatattccacctgcacaggacggatcctacggtcattcagc

SEQ ID NO: 527 - DNA, 158 bp, synthetic construct
  misc_feature 1..158: note = Synthetic nucleic acid
  source 1..158: mol_type = other DNA
cagacgacggccagtgtcgacatggcacaagtcattaataccaacagcctctcgctgatcactcaaaataatataacacttcttgcggcgatggttcctggctcttcgatccaggttctgtctctgctgcagggtagaggatcctacggtcattcagc

SEQ ID NO: 528 - DNA, 158 bp, synthetic construct
  misc_feature 1..158: note = Synthetic nucleic acid
  source 1..158: mol_type = other DNA
cagacgacggccagtgtcgacatggctcaccctcatttattagcggaaagaatttcccgcctgagcaaacacttcttgcggcgatggttcctggctcttcgatccggtgcacagattcgccaggcacaacaatgctatggatcctacggtcattcagc

SEQ ID NO: 529 - DNA, 158 bp, synthetic construct
  misc_feature 1..158: note = Synthetic nucleic acid
  source 1..158: mol_type = other DNA
cagacgacggccagtgtcgacatgaaacgccccaattttctgttcgtcatgaccgataccaacacttcttgcggcgatggttcctggctcttcgatccacaaggggtgaaggtggaggagaaaaaacagaagttcttcggatcctacggtcattcagc

SEQ ID NO: 530 - DNA, 158 bp, synthetic construct
  misc_feature 1..158: note = Synthetic nucleic acid
  source 1..158: mol_type = other DNA
cagacgacggccagtgtcgacatggacgccatgaaatataacgatttacgcgacttcttgacgaacacttcttgcggcgatggttcctggctcttcgatcatgaactggctatttttaacaacggtaaaagcgcccctggatcctacggtcattcagc

SEQ ID NO: 531 - DNA, 158 bp, synthetic construct
  misc_feature 1..158: note = Synthetic nucleic acid
  source 1..158: mol_type = other DNA
cagacgacggccagtgtcgacatggcgaaagaaaaaaaacgtggctttttttcctggctggaacacttcttgcggcgatggttcctggctcttcgatcggacgactttatagaggcactttttgcccgagaggattttggatcctacggtcattcagc

SEQ ID NO: 532 - DNA, 158 bp, synthetic construct
  misc_feature 1..158: note = Synthetic nucleic acid
  source 1..158: mol_type = other DNA
cagacgacggccagtgtcgacatgaaattgcaccatagaatgctccggcattttatcgccaacacttcttgcggcgatggttcctggctcttcgatcgtttatatgtcaataagcagaacaaaaacagccgttcagacggatcctacggtcattcagc

SEQ ID NO: 533 - DNA, 158 bp, synthetic construct
  misc_feature 1..158: note = Synthetic nucleic acid
  source 1..158: mol_type = other DNA
cagacgacggccagtgtcgacatgagtactacaacccagaatatcccgtggtatcgccatctaacacttcttgcggcgatggttcctggctcttcgatcggcagcgccaaaaacgatttagtcaaaaccaaaagtactggatcctacggtcattcagc

SEQ ID NO: 534 - DNA, 158 bp, synthetic construct
  misc_feature 1..158: note = Synthetic nucleic acid
  source 1..158: mol_type = other DNA
cagacgacggccagtgtcgacatgaacaaagaaattttggctgtagttgaagccgtatccaatgaaaaggaacacttcttgcggcgatggttcctggctcttcgatctaatatttgctggttcggtgacgaagcgaccggatcctacggtcattcagc

SEQ ID NO: 535 - DNA, 158 bp, synthetic construct
  misc_feature 1..158: note = Synthetic nucleic acid
  source 1..158: mol_type = other DNA
cagacgacggccagtgtcgacatgaattttcatcatctggcttactggcaggataaagcgttaagtctaacacttcttgcggcgatggttcctggctcttcgatcctgaaaaccatctggataagcctggaggcccgaggatcctacggtcattcagc

SEQ ID NO: 536 - DNA, 158 bp, synthetic construct
  misc_feature 1..158: note = Synthetic nucleic acid
  source 1..158: mol_type = other DNA
cagacgacggccagtgtcgacatgcaatacatcaagatccatgcgctggataacgtcgcggtcaacacttcttgcggcgatggttcctggctcttcgatcgcgaactggcgatcttcaaaagcggcgtaacgctactaggatcctacggtcattcagc

SEQ ID NO: 537 - DNA, 158 bp, synthetic construct
  misc_feature 1..158: note = Synthetic nucleic acid
  source 1..158: mol_type = other DNA
cagacgacggccagtgtcgacatgcgtaatcccacgctgttacaatgttttcactggtattacccaacacttcttgcggcgatggttcctggctcttcgatcagcgtcagcgtgtgggttatcgaagaggtgattgttggatcctacggtcattcagc

SEQ ID NO: 538 - DNA, 158 bp, synthetic construct
  misc_feature 1..158: note = Synthetic nucleic acid
  source 1..158: mol_type = other DNA
cagacgacggccagtgtcgacatgtctcgtaatactgaagcaactgacgatgtcaaaacctggaccgaacacttcttgcggcgatggttcctggctcttcgatccctcgccatcagtcttgaacacagcgtcggacgtggatcctacggtcattcagc

SEQ ID NO: 539 - DNA, 158 bp, synthetic construct
  misc_feature 1..158: note = Synthetic nucleic acid
  source 1..158: mol_type = other DNA
cagacgacggccagtgtcgacatgtggtttcactttctgcaattaaggtcggctttgaatatctcctaacacttcttgcggcgatggttcctggctcttcgatcaaagtgtgaaaaaaagccagttgtgtcggaatttggatcctacggtcattcagc

SEQ ID NO: 540 - DNA, 158 bp, synthetic construct
  misc_feature 1..158: note = Synthetic nucleic acid
  source 1..158: mol_type = other DNA
cagacgacggccagtgtcgacgtggcagatcgtaatttgcgcgaccttcttgctccgtgggtgccaaacacttcttgcggcgatggttcctggctcttcgatctcacggtggcgcgtctgctgggggtgattgcatgcggatcctacggtcattcagc

SEQ ID NO: 541 - DNA, 158 bp, synthetic construct
  misc_feature 1..158: note = Synthetic nucleic acid
  source 1..158: mol_type = other DNA
cagacgacggccagtgtcgacatgggttccacctcgtcgctgtatgcagccattgatctcggttaacacttcttgcggcgatggttcctggctcttcgatcgcagagctatgtccactggccgctggaagtgcatctcggatcctacggtcattcagc

SEQ ID NO: 542 - DNA, 158 bp, synthetic construct
  misc_feature 1..158: note = Synthetic nucleic acid
  source 1..158: mol_type = other DNA
cagacgacggccagtgtcgacatgaagaaattgctccccattcttatcggcctgagcctttaacacttcttgcggcgatggttcctggctcttcgatccactaccaccagtaacggtcataaccctttccgtaacgtaggatcctacggtcattcagc

SEQ ID NO: 543 - DNA, 158 bp, synthetic construct
  misc_feature 1..158: note = Synthetic nucleic acid
  source 1..158: mol_type = other DNA
cagacgacggccagtgtcgacatgaataaacacgcatcacagccgcgcgctatttactatgtcgttgcgctaacacttcttgcggcgatggttcctggctcttcgatcagaaaccgcgcgctggcgctggagtctcgaggatcctacggtcattcagc

SEQ ID NO: 544 - DNA, 158 bp, synthetic construct
  misc_feature 1..158: note = Synthetic nucleic acid
  source 1..158: mol_type = other DNA
cagacgacggccagtgtcgacatgagaattcactcaccgtaccccgccagttgggcgctggcacaaaacacttcttgcggcgatggttcctggctcttcgatcgcgtcgccagtgccacgctggagagcgaagcaaatggatcctacggtcattcagc

SEQ ID NO: 545 - DNA, 158 bp, synthetic construct
  misc_feature 1..158: note = Synthetic nucleic acid
  source 1..158: mol_type = other DNA
cagacgacggccagtgtcgacatgactttatggattaacggtgactggataacgggccagggcgcataacacttcttgcggcgatggttcctggctcttcgatccgggctggatttttccgatgaggtggtgcgaaggggatcctacggtcattcagc

SEQ ID NO: 546 - DNA, 158 bp, synthetic construct
  misc_feature 1..158: note = Synthetic nucleic acid
  source 1..158: mol_type = other DNA
cagacgacggccagtgtcgacatgagcttacgtgaaaaaaccatcagcggcgcgaagtggtaacacttcttgcggcgatggttcctggctcttcgatctcgcagcgaaaaaatgaaaatgcttttacgggcggggagtggatcctacggtcattcagc

SEQ ID NO: 547 - DNA, 158 bp, synthetic construct
  misc_feature 1..158: note = Synthetic nucleic acid
  source 1..158: mol_type = other DNA
cagacgacggccagtgtcgacatggaaactcagtggacaaggatgaccgccaatgaagcaacacttcttgcggcgatggttcctggctcttcgatcttacaccgtaatttaattgcaaccggctcgatgctgggtgtaggatcctacggtcattcagc

SEQ ID NO: 548 - DNA, 158 bp, synthetic construct
  misc_feature 1..158: note = Synthetic nucleic acid
  source 1..158: mol_type = other DNA
cagacgacggccagtgtcgacatgtcgaaaaaatacatcatagggattgatggcggaagtcagagcaaacacttcttgcggcgatggttcctggctcttcgatctgtggattcgatccagagctggtcgaatgcgcaaggatcctacggtcattcagc

SEQ ID NO: 549 - DNA, 158 bp, synthetic construct
  misc_feature 1..158: note = Synthetic nucleic acid
  source 1..158: mol_type = other DNA
cagacgacggccagtgtcgacatgaatacacaacaattggcaaaactgcgttccatcgtgccaacacttcttgcggcgatggttcctggctcttcgatcctgaagccgcaaactccggaggaagaacaacatgaccgtggatcctacggtcattcagc

SEQ ID NO: 550 - DNA, 158 bp, synthetic construct
  misc_feature 1..158: note = Synthetic nucleic acid
  source 1..158: mol_type = other DNA
cagacgacggccagtgtcgacatggcggtaacgcaaacagcccaggcctgtgaaacacttcttgcggcgatggttcctggctcttcgatcgtggcgatgattacccgtgatggtcgttcctggaatgagtttgagtgtggatcctacggtcattcagc

SEQ ID NO: 551 - DNA, 158 bp, synthetic construct
  misc_feature 1..158: note = Synthetic nucleic acid
  source 1..158: mol_type = other DNA
cagacgacggccagtgtcgacatggctaactacttcaatacactgaatctgcgccagcaaacacttcttgcggcgatggttcctggctcttcgatcggctatatgacagatatgaaacgtattgctgttgcgggttctggatcctacggtcattcagc

SEQ ID NO: 552 - DNA, 158 bp, synthetic construct
  misc_feature 1..158: note = Synthetic nucleic acid
  source 1..158: mol_type = other DNA
cagacgacggccagtgtcgacatgtccagtcaatatttacgtatttttcaacagccgcgttcagcaacacttcttgcggcgatggttcctggctcttcgatcgattatctggcgctacgaaaaacgcatctgacgttcggatcctacggtcattcagc

SEQ ID NO: 553 - DNA, 158 bp, synthetic construct
  misc_feature 1..158: note = Synthetic nucleic acid
  source 1..158: mol_type = other DNA
cagacgacggccagtgtcgacatggtacctgtggtcgcgcttgtcgggcgccctaaaacacttcttgcggcgatggttcctggctcttcgatccgtaaacgtaagcgtctgatgaagcacatcaagaaaaataaatcgggatcctacggtcattcagc

SEQ ID NO: 554 - DNA, 158 bp, synthetic construct
  misc_feature 1..158: note = Synthetic nucleic acid
  source 1..158: mol_type = other DNA
cagacgacggccagtgtcgacatgtcatcgttgcaaattttgcaaggcacgtttcgtaacacttcttgcggcgatggttcctggctcttcgatccggacggtggactctatcgctatgtgctgacaaaaatatattcaggatcctacggtcattcagc

SEQ ID NO: 555 - DNA, 158 bp, synthetic construct
  misc_feature 1..158: note = Synthetic nucleic acid
  source 1..158: mol_type = other DNA
cagacgacggccagtgtcgacatgtcccgaatggcagaacagcagctttatatacatggtgaacacttcttgcggcgatggttcctggctcttcgatccatccaggttgagatggctaaattccagtccatattcagtggatcctacggtcattcagc

SEQ ID NO: 556 - DNA, 158 bp, synthetic construct
  misc_feature 1..158: note = Synthetic nucleic acid
  source 1..158: mol_type = other DNA
cagacgacggccagtgtcgacatgaatacaacaacacccatggggatgctgcagcaacctcgccaacacttcttgcggcgatggttcctggctcttcgatcgctgaaacgcatgattgcgacgccggaaagccattatggatcctacggtcattcagc

SEQ ID NO: 557 - DNA, 158 bp, synthetic construct
  misc_feature 1..158: note = Synthetic nucleic acid
  source 1..158: mol_type = other DNA
cagacgacggccagtgtcgacatgacctttcgcaattgtgtcgccgtcgatctcggcaacacttcttgcggcgatggttcctggctcttcgatccgcagattcactctacacgacagacaaaggagctttgcgcacctggatcctacggtcattcagc

SEQ ID NO: 558 - DNA, 158 bp, synthetic construct
  misc_feature 1..158: note = Synthetic nucleic acid
  source 1..158: mol_type = other DNA
cagacgacggccagtgtcgacatgacggctgaattgttagtaaacgtaacgccttcggaaaaacacttcttgcggcgatggttcctggctcttcgatcgctctataaccaggagcagtttgacgtcgtaatgatgctaggatcctacggtcattcagc

SEQ ID NO: 559 - DNA, 158 bp, synthetic construct
  misc_feature 1..158: note = Synthetic nucleic acid
  source 1..158: mol_type = other DNA
cagacgacggccagtgtcgacatggtttccgaaactaaaaccacagaagcgccgggaacacttcttgcggcgatggttcctggctcttcgatcgtacgctacagcgaaatgaagttcccgcagaacgataagaaaattggatcctacggtcattcagc

SEQ ID NO: 560 - DNA, 158 bp, synthetic construct
  misc_feature 1..158: note = Synthetic nucleic acid
  source 1..158: mol_type = other DNA
cagacgacggccagtgtcgacatgtctacgagaagagaagttattctttcctggttgtgtgagaaacgtaacacttcttgcggcgatggttcctggctcttcgatctttccccggaaacaacagtgaaggggaaatctggatcctacggtcattcagc

SEQ ID NO: 561 - DNA, 158 bp, synthetic construct
  misc_feature 1..158: note = Synthetic nucleic acid
  source 1..158: mol_type = other DNA
cagacgacggccagtgtcgacatgaatacaatcgcctccgttacgctcccgcatcatgtacaaacacttcttgcggcgatggttcctggctcttcgatcggcgcacatcaggcgctattaaacaccctcaaaattcctggatcctacggtcattcagc

SEQ ID NO: 562 - DNA, 158 bp, synthetic construct
  misc_feature 1..158: note = Synthetic nucleic acid
  source 1..158: mol_type = other DNA
cagacgacggccagtgtcgacatgatcaatcgtcaactttcacgtctgctgttgtgcagcattctaacacttcttgcggcgatggttcctggctcttcgatcgggtatcaggcaggtcccgtcgtcgagaaaaaaagaggatcctacggtcattcagc

SEQ ID NO: 563 - DNA, 158 bp, synthetic construct
  misc_feature 1..158: note = Synthetic nucleic acid
  source 1..158: mol_type = other DNA
cagacgacggccagtgtcgacatgctacgtatcgctaaagaagctctgacgtttgacgacgttaacacttcttgcggcgatggttcctggctcttcgatcttactaaagagtccccgaactaccgtctgggctccgacggatcctacggtcattcagc

SEQ ID NO: 564 - DNA, 158 bp, synthetic construct
  misc_feature 1..158: note = Synthetic nucleic acid
  source 1..158: mol_type = other DNA
cagacgacggccagtgtcgacatgaaaccttccactgaatggtggcgatatcttgcgccgctaacacttcttgcggcgatggttcctggctcttcgatcattaccggcttactgtggatgcccgtggtgttgcttgagggatcctacggtcattcagc

SEQ ID NO: 565 - DNA, 158 bp, synthetic construct
  misc_feature 1..158: note = Synthetic nucleic acid
  source 1..158: mol_type = other DNA
cagacgacggccagtgtcgacatgtctttagcaaaagataatatatggaaactattggccccactggtggtgataacacttcttgcggcgatggttcctggctcttcgatctggccgattctcgccatgtggaactgcggatcctacggtcattcagc

SEQ ID NO: 566 - DNA, 158 bp, synthetic construct
  misc_feature 1..158: note = Synthetic nucleic acid
  source 1..158: mol_type = other DNA
cagacgacggccagtgtcgacatgttcaggcagttgaaaaaaaacctggttgcaaccctcattaacacttcttgcggcgatggttcctggctcttcgatcagctgcaggaacgctttaagccttataccaagatgcaaggatcctacggtcattcagc

SEQ ID NO: 567 - DNA, 158 bp, synthetic construct
  misc_feature 1..158: note = Synthetic nucleic acid
  source 1..158: mol_type = other DNA
cagacgacggccagtgtcgacatgaaaaaattactgcgtctttttttcccgctctcgctgcggaacacttcttgcggcgatggttcctggctcttcgatctttttggtcgccagcattctgcgccgaaagatgaatatggatcctacggtcattcagc

SEQ ID NO: 568 - DNA, 158 bp, synthetic construct
  misc_feature 1..158: note = Synthetic nucleic acid
  source 1..158: mol_type = other DNA
cagacgacggccagtgtcgacatgacaaccgtttatacgttggtgagttggttggccattctgaacacttcttgcggcgatggttcctggctcttcgatcccgagcgactgttttacttcttcagtccgttgctgcccggatcctacggtcattcagc

SEQ ID NO: 569 - DNA, 158 bp, synthetic construct
  misc_feature 1..158: note = Synthetic nucleic acid
  source 1..158: mol_type = other DNA
cagacgacggccagtgtcgacatgactactattgttgacagcaatctgccggttgcccgcccgtcatgggataacacttcttgcggcgatggttcctggctcttcgatcgtgcgcgcgagtgtgtggctgcgctggacggatcctacggtcattcagc

SEQ ID NO: 570 - DNA, 158 bp, synthetic construct
  misc_feature 1..158: note = Synthetic nucleic acid
  source 1..158: mol_type = other DNA
cagacgacggccagtgtcgacatgaaaacaccctcacagccgcgcgcgatatactatataacacttcttgcggcgatggttcctggctcttcgatctttagcacgccgacgaatatgatacaggagagcaacgatagtggatcctacggtcattcagc

SEQ ID NO: 571 - DNA, 158 bp, synthetic construct
  misc_feature 1..158: note = Synthetic nucleic acid
  source 1..158: mol_type = other DNA
cagacgacggccagtgtcgacatgaatacatctcatgtaagagttgttactcatatgtgtgggttcctggtttgaacacttcttgcggcgatggttcctggctcttcgatcttttcaggttttttttggcgctccggtggatcctacggtcattcagc

SEQ ID NO: 572 - DNA, 158 bp, synthetic construct
  misc_feature 1..158: note = Synthetic nucleic acid
  source 1..158: mol_type = other DNA
cagacgacggccagtgtcgacatgacaataactccacaaaacctgatcgcactgctaccgttgctaacacttcttgcggcgatggttcctggctcttcgatcattagcattgtgcgtttggcaatgccgctgatgcccggatcctacggtcattcagc

SEQ ID NO: 573 - DNA, 158 bp, synthetic construct
  misc_feature 1..158: note = Synthetic nucleic acid
  source 1..158: mol_type = other DNA
cagacgacggccagtgtcgacatggccaaaaattatgcggcgctggcacgctcaacacttcttgcggcgatggttcctggctcttcgatctatcagagcgtacaaccgaccgtcgccaaagaagtaagtcttaataaaggatcctacggtcattcagc

SEQ ID NO: 574 - DNA, 158 bp, synthetic construct
  misc_feature 1..158: note = Synthetic nucleic acid
  source 1..158: mol_type = other DNA
cagacgacggccagtgtcgacgtgtctgaactgtctcaattatctccacagccgctgtggaacacttcttgcggcgatggttcctggctcttcgatccactgctgactgaactgctgaaagaaattccggcgaaggcgggatcctacggtcattcagc

SEQ ID NO: 575 - DNA, 158 bp, synthetic construct
  misc_feature 1..158: note = Synthetic nucleic acid
  source 1..158: mol_type = other DNA
cagacgacggccagtgtcgacatgaataataagggctccggtctgaccccagctcaggcaaacacttcttgcggcgatggttcctggctcttcgatccgcgtaaattacgaacctttaatgagccgccgttccgaacaggatcctacggtcattcagc

SEQ ID NO: 576 - DNA, 158 bp, synthetic construct
  misc_feature 1..158: note = Synthetic nucleic acid
  source 1..158: mol_type = other DNA
cagacgacggccagtgtcgacatggaacatcagagaaaactattccagcaacgcggctatagcaacacttcttgcggcgatggttcctggctcttcgatccagcagaaaaaacaggagagcaaaaaaccataggtgacggatcctacggtcattcagc

SEQ ID NO: 577 - DNA, 158 bp, synthetic construct
  misc_feature 1..158: note = Synthetic nucleic acid
  source 1..158: mol_type = other DNA
cagacgacggccagtgtcgacatgtatatcgggatagatcttggcacctcgggcgtaaaagttattttaacacttcttgcggcgatggttcctggctcttcgatcctctatcagcaacttctgccattaatggcgaatggatcctacggtcattcagc

SEQ ID NO: 578 - DNA, 158 bp, synthetic construct
  misc_feature 1..158: note = Synthetic nucleic acid
  source 1..158: mol_type = other DNA
cagacgacggccagtgtcgacatgaaaacatgttggcaaatcctcgaaattgaaagcacgacgaacacttcttgcggcgatggttcctggctcttcgatcgttatgctctcggcaaaatcgcgatgttgtttagccacggatcctacggtcattcagc

SEQ ID NO: 579 - DNA, 158 bp, synthetic construct
  misc_feature 1..158: note = Synthetic nucleic acid
  source 1..158: mol_type = other DNA
cagacgacggccagtgtcgacatgcagcttgaagtaattctaccgctggtcgcctatctgaacacttcttgcggcgatggttcctggctcttcgatccatccgtcccgcaagctaccgttttgactactgataaacccggatcctacggtcattcagc

SEQ ID NO: 580 - DNA, 158 bp, synthetic construct
  misc_feature 1..158: note = Synthetic nucleic acid
  source 1..158: mol_type = other DNA
cagacgacggccagtgtcgacatgcattttcgcgccattacccgaatcgttggactactggtaacacttcttgcggcgatggttcctggctcttcgatcttgctggtgctctttaccccgactttctggcgtgaagaaggatcctacggtcattcagc

SEQ ID NO: 581 - DNA, 158 bp, synthetic construct
  misc_feature 1..158: note = Synthetic nucleic acid
  source 1..158: mol_type = other DNA
cagacgacggccagtgtcgacatgctaacgctggatacgcttaatgtgatgctggccgtcagcgaagagggattaacacttcttgcggcgatggttcctggctcttcgatccgcctgctcagacgctggcggcgagctggatcctacggtcattcagc

SEQ ID NO: 582 - DNA, 158 bp, synthetic construct
  misc_feature 1..158: note = Synthetic nucleic acid
  source 1..158: mol_type = other DNA
cagacgacggccagtgtcgacatggagtcatccttacgtattgtcgcgatcaccaactgccccaacacttcttgcggcgatggttcctggctcttcgatccgaaagccgcgcaacaggagcttgtccatgaacatacaggatcctacggtcattcagc

SEQ ID NO: 583 - DNA, 158 bp, synthetic construct
  misc_feature 1..158: note = Synthetic nucleic acid
  source 1..158: mol_type = other DNA
cagacgacggccagtgtcgacatgtcagctcaaatcaacaacatccgcccggaatttgataacacttcttgcggcgatggttcctggctcttcgatcagatgccggtcaatgagtatctcgacctgtacgtcattcccggatcctacggtcattcagc

SEQ ID NO: 584 - DNA, 158 bp, synthetic construct
  misc_feature 1..158: note = Synthetic nucleic acid
  source 1..158: mol_type = other DNA
cagacgacggccagtgtcgacgtgaaaacactaaatcgtcgcgattttcccggtgcacagtatccagaaaacacttcttgcggcgatggttcctggctcttcgatcggatgcgcgaagctgtacgtccgttgtgccaaggatcctacggtcattcagc

SEQ ID NO: 585 - DNA, 158 bp, synthetic construct
  misc_feature 1..158: note = Synthetic nucleic acid
  source 1..158: mol_type = other DNA
cagacgacggccagtgtcgacatgaaacttaacgacagtaacttattccgccagcaggcgttaacacttcttgcggcgatggttcctggctcttcgatcgattacttagaaatcaaatatatgtgcatcggtcttcccggatcctacggtcattcagc

SEQ ID NO: 586 - DNA, 158 bp, synthetic construct
  misc_feature 1..158: note = Synthetic nucleic acid
  source 1..158: mol_type = other DNA
cagacgacggccagtgtcgacatgaagtttatcattaaattgttcccggaaatcaccatcaaaagccaatctgtaacacttcttgcggcgatggttcctggctcttcgatcaacaatgtgaaggtatatcgcccgggaggatcctacggtcattcagc

SEQ ID NO: 587 - DNA, 158 bp, synthetic construct
  misc_feature 1..158: note = Synthetic nucleic acid
  source 1..158: mol_type = other DNA
cagacgacggccagtgtcgacatgagcgccatagattcccaacttccctcatcttctggaacacttcttgcggcgatggttcctggctcttcgatccttctgatgcgcaagctgaagaaaaatgagcatggagaaaagggatcctacggtcattcagc

SEQ ID NO: 588 - DNA, 158 bp, synthetic construct
  misc_feature 1..158: note = Synthetic nucleic acid
  source 1..158: mol_type = other DNA
cagacgacggccagtgtcgacatgagtcttaacctggtaagtgaacaattgctagcggcgaacaacacttcttgcggcgatggttcctggctcttcgatctgaaagtcgataacctgactgttggcggtactgcgatgggatcctacggtcattcagc

SEQ ID NO: 589 - DNA, 158 bp, synthetic construct
  misc_feature 1..158: note = Synthetic nucleic acid
  source 1..158: mol_type = other DNA
cagacgacggccagtgtcgacatgcaggaaatctatcgttttatcgacgatgcgattgaagccaacacttcttgcggcgatggttcctggctcttcgatcctatcccgaaaaacgtgacaccgtcacctttaaaagacggatcctacggtcattcagc

SEQ ID NO: 590 - DNA, 158 bp, synthetic construct
  misc_feature 1..158: note = Synthetic nucleic acid
  source 1..158: mol_type = other DNA
cagacgacggccagtgtcgacttggttttgctggcaatgggactggtgatttatttagccaccagtaaataaacacttcttgcggcgatggttcctggctcttcgatcgcgggaaccgtattcaaaggcgacaacaaaggatcctacggtcattcagc

SEQ ID NO: 591 - DNA, 158 bp, synthetic construct
  misc_feature 1..158: note = Synthetic nucleic acid
  source 1..158: mol_type = other DNA
cagacgacggccagtgtcgacatggtcagtaagccatttcagcgcccgttttcgctggcaaaacacttcttgcggcgatggttcctggctcttcgatctgcgcgggggacaaggtttgttatcacattacccgcttttggatcctacggtcattcagc

SEQ ID NO: 592 - DNA, 158 bp, synthetic construct
  misc_feature 1..158: note = Synthetic nucleic acid
  source 1..158: mol_type = other DNA
cagacgacggccagtgtcgacatgtccagaaggcttcgcagaacaaaaatcgttaccacgttaaacacttcttgcggcgatggttcctggctcttcgatcgttctactaataccacgcgtattttaacggtagagaaaggatcctacggtcattcagc

SEQ ID NO: 593 - DNA, 158 bp, synthetic construct
  misc_feature 1..158: note = Synthetic nucleic acid
  source 1..158: mol_type = other DNA
cagacgacggccagtgtcgacatgatagtgaaaaaactcaccttaccgaaagatttcttatggggcggcaacacttcttgcggcgatggttcctggctcttcgatcaggtgattgccagcaacggcgagaagcttggatcctacggtcattcagccgc

SEQ ID NO: 594 - DNA, 158 bp, synthetic construct
  misc_feature 1..158: note = Synthetic nucleic acid
  source 1..158: mol_type = other DNA
cagacgacggccagtgtcgacatggaaaatcttgctctgacgacgttattgctgccttttatcggcgcaaacacttcttgcggcgatggttcctggctcttcgatcccagcgtaatcgccgcgacctggttgcagattggatcctacggtcattcagc

SEQ ID NO: 595 - DNA, 158 bp, synthetic construct
  misc_feature 1..158: note = Synthetic nucleic acid
  source 1..158: mol_type = other DNA
cagacgacggccagtgtcgacatgtcagtacccgttcaacatcctatgtatatcgatggacagtttgttacaacacttcttgcggcgatggttcctggctcttcgatccagacccaggtggtttatttacagtcttgtggatcctacggtcattcagc

SEQ ID NO: 596 - DNA, 158 bp, synthetic construct
  misc_feature 1..158: note = Synthetic nucleic acid
  source 1..158: mol_type = other DNA
cagacgacggccagtgtcgacatgtctattgtggtgaaaaataacattcattgggttggtcaacgtgactaacacttcttgcggcgatggttcctggctcttcgatcctttgaagaactggcatcggaggcaaaatcaggatcctacggtcattcagc

SEQ ID NO: 597 - DNA, 158 bp, synthetic construct
  misc_feature 1..158: note = Synthetic nucleic acid
  source 1..158: mol_type = other DNA
cagacgacggccagtgtcgacgtggcccaacacaccgtttatttcccggacgcctttctaacacttcttgcggcgatggttcctggctcttcgatcgaactggtgcgcgatgggaaactttttaccggtaacgccgccggatcctacggtcattcagc

SEQ ID NO: 598 - DNA, 158 bp, synthetic construct
  misc_feature 1..158: note = Synthetic nucleic acid
  source 1..158: mol_type = other DNA
cagacgacggccagtgtcgacatgaccctgtcttttgttacccgctggcgcgatgaattgccaaacacttcttgcggcgatggttcctggctcttcgatcactggggtaaacggctggaagtcagctgctcgagtaacggatcctacggtcattcagc

SEQ ID NO: 599 - DNA, 158 bp, synthetic construct
  misc_feature 1..158: note = Synthetic nucleic acid
  source 1..158: mol_type = other DNA
cagacgacggccagtgtcgacatggcgcagtcgaaactctatccagttgtgatggcaggtggctccaacacttcttgcggcgatggttcctggctcttcgatctggtgcgtttcgcggatcgctacggacgggtgggaggatcctacggtcattcagc

SEQ ID NO: 600 - DNA, 158 bp, synthetic construct
  misc_feature 1..158: note = Synthetic nucleic acid
  source 1..158: mol_type = other DNA
cagacgacggccagtgtcgacatgtcaaacaacattcgtatcgaagaagatctgttgggtaccaggaacacttcttgcggcgatggttcctggctcttcgatcaagcaaaacgctatactgatgaaagcgaacagaaaggatcctacggtcattcagc

SEQ ID NO: 601 - DNA, 158 bp, synthetic construct
  misc_feature 1..158: note = Synthetic nucleic acid
  source 1..158: mol_type = other DNA
cagacgacggccagtgtcgacatgaaagtaacgctgccagagtttgaacgtgcaggaaacacttcttgcggcgatggttcctggctcttcgatccgaccaacatcatcaagaagatccaacaggataaaaaaggcactggatcctacggtcattcagc

SEQ ID NO: 602 - DNA, 158 bp, synthetic construct
  misc_feature 1..158: note = Synthetic nucleic acid
  source 1..158: mol_type = other DNA
cagacgacggccagtgtcgacatgaagcaaggtttgcaactcaggcttagccaacaactggcaacacttcttgcggcgatggttcctggctcttcgatctccattccgccgtcaaaccagcgtaaacaactcgtttggggatcctacggtcattcagc

SEQ ID NO: 603 - DNA, 158 bp, synthetic construct
  misc_feature 1..158: note = Synthetic nucleic acid
  source 1..158: mol_type = other DNA
cagacgacggccagtgtcgacatgcaggttttacatgtatgttcagagatgttcccgctgcttaaaaaacacttcttgcggcgatggttcctggctcttcgatcgtcgtaccgtgagctttactatcgcttgaaacgaggatcctacggtcattcagc

SEQ ID NO: 604 - DNA, 158 bp, synthetic construct
  misc_feature 1..158: note = Synthetic nucleic acid
  source 1..158: mol_type = other DNA
cagacgacggccagtgtcgacatgtctgataccaaacgtaatacaatcggcaaattcggcttgctaacacttcttgcggcgatggttcctggctcttcgatccatattgaagcgacgccagccagcaatgttgattttggatcctacggtcattcagc

SEQ ID NO: 605 - DNA, 158 bp, synthetic construct
  misc_feature 1..158: note = Synthetic nucleic acid
  source 1..158: mol_type = other DNA
cagacgacggccagtgtcgacatgtttaagaatgcatttgctaacctgcaaaaggtcggtaaatcgctaacacttcttgcggcgatggttcctggctcttcgatcaccgagatggatgagtacatccgtaaccacgctggatcctacggtcattcagc

SEQ ID NO: 606 - DNA, 158 bp, synthetic construct
  misc_feature 1..158: note = Synthetic nucleic acid
  source 1..158: mol_type = other DNA
cagacgacggccagtgtcgacatgatacgtaagtcagctacaggtgttattgttgcgttagccgtaataacacttcttgcggcgatggttcctggctcttcgatctttatgtctcgtgccggacgttttgttcatcctggatcctacggtcattcagc

SEQ ID NO: 607 - DNA, 158 bp, synthetic construct
  misc_feature 1..158: note = Synthetic nucleic acid
  source 1..158: mol_type = other DNA
cagacgacggccagtgtcgacatgccagattttttctccttcattaacagcgtcctttggggatcggtaataacacttcttgcggcgatggttcctggctcttcgatcgacgcgtgggatgatgtttcgcaggagggcggatcctacggtcattcagc

SEQ ID NO: 608 - DNA, 158 bp, synthetic construct
  misc_feature 1..158: note = Synthetic nucleic acid
  source 1..158: mol_type = other DNA
cagacgacggccagtgtcgacatggctgggaatgttcaggaaaaacagttgcgatggtacaaaacacttcttgcggcgatggttcctggctcttcgatcatattcccgctgctggcgcgtaaagcgaatagtaaacgaggatcctacggtcattcagc

SEQ ID NO: 609 - DNA, 158 bp, synthetic construct
  misc_feature 1..158: note = Synthetic nucleic acid
  source 1..158: mol_type = other DNA
cagacgacggccagtgtcgacgtgccgcaacgcattttagttctcggtgccagtggaacacttcttgcggcgatggttcctggctcttcgatcatggcaaaacaaatcgccagactggcagaacaaagcacagattcaggatcctacggtcattcagc

SEQ ID NO: 610 - DNA, 158 bp, synthetic construct
  misc_feature 1..158: note = Synthetic nucleic acid
  source 1..158: mol_type = other DNA
cagacgacggccagtgtcgacatgaaaaattgctggaagatcctcgatatagaggaaacgactgacgtaacacttcttgcggcgatggttcctggctcttcgatcttgatagggaaaatactccatctgttcgggccaggatcctacggtcattcagc

SEQ ID NO: 611 - DNA, 158 bp, synthetic construct
  misc_feature 1..158: note = Synthetic nucleic acid
  source 1..158: mol_type = other DNA
cagacgacggccagtgtcgacatgaacaccgcacttgcacaacaaatcgccaatgaaggcggcgtaacacttcttgcggcgatggttcctggctcttcgatccactggggcgcgcgcgatttgctgggggataaagctggatcctacggtcattcagc

SEQ ID NO: 612 - DNA, 158 bp, synthetic construct
  misc_feature 1..158: note = Synthetic nucleic acid
  source 1..158: mol_type = other DNA
cagacgacggccagtgtcgacatgagcgataaaaagaagcgcagtatggcgggtttgccaacacttcttgcggcgatggttcctggctcttcgatccgtaaatctaagccgaaccgcgttccatcagaatcggagtacggatcctacggtcattcagc

SEQ ID NO: 613 - DNA, 158 bp, synthetic construct
  misc_feature 1..158: note = Synthetic nucleic acid
  source 1..158: mol_type = other DNA
cagacgacggccagtgtcgacatgatgaatgacggtaagcaacaatctacctttttgtttcacgattacgaaaaacacttcttgcggcgatggttcctggctcttcgatcttggcagtacgcggaagagattgtcactggatcctacggtcattcagc

SEQ ID NO: 614 - DNA, 158 bp, synthetic construct
  misc_feature 1..158: note = Synthetic nucleic acid
  source 1..158: mol_type = other DNA
cagacgacggccagtgtcgacatgatgataaatgtgcaaactgtggcagtgattgggagcggcaaacacttcttgcggcgatggttcctggctcttcgatcccaacgggcgcttctggagagcggttatgagtcagttggatcctacggtcattcagc

SEQ ID NO: 615 - DNA, 158 bp, synthetic construct
  misc_feature 1..158: note = Synthetic nucleic acid
  source 1..158: mol_type = other DNA
cagacgacggccagtgtcgacatgtcgatcaaaaccagtaatacagattttaagacacgcatccgtcaaacacttcttgcggcgatggttcctggctcttcgatcaaacatcaggcgcaggagaaaaagaatggaaatggatcctacggtcattcagc

SEQ ID NO: 616 - DNA, 158 bp, synthetic construct
  misc_feature 1..158: note = Synthetic nucleic acid
  source 1..158: mol_type = other DNA
cagacgacggccagtgtcgacgtggatttctcaatcatggtttacgcagttattgcgttggtgaacacttcttgcggcgatggttcctggctcttcgatcatcaacgcgatgatgaatataatcagcagtcgcgcttaggatcctacggtcattcagc

SEQ ID NO: 617 - DNA, 158 bp, synthetic construct
  misc_feature 1..158: note = Synthetic nucleic acid
  source 1..158: mol_type = other DNA
cagacgacggccagtgtcgacttgaaacgctggcccgtttttccccgctcattacaacacttcttgcggcgatggttcctggctcttcgatccgtttgtttccgcattgaattaccgtcgtcgaaaaacacgaaaaggggatcctacggtcattcagc

SEQ ID NO: 618 - DNA, 158 bp, synthetic construct
  misc_feature 1..158: note = Synthetic nucleic acid
  source 1..158: mol_type = other DNA
cagacgacggccagtgtcgacatgaaaaaaaccacattagcactgagtgcactggctctgagtttagaacacttcttgcggcgatggttcctggctcttcgatccggcgacagcaccatctacctgttaatgcagcttggatcctacggtcattcagc

SEQ ID NO: 619 - DNA, 158 bp, synthetic construct
  misc_feature 1..158: note = Synthetic nucleic acid
  source 1..158: mol_type = other DNA
cagacgacggccagtgtcgacatgaccaaaaaactccatattaaaacctggggctgtcagatgaacgaaacacttcttgcggcgatggttcctggctcttcgatcaacgaccttggcgtgggttattatcagccgaacggatcctacggtcattcagc

SEQ ID NO: 620 - DNA, 158 bp, synthetic construct
  misc_feature 1..158: note = Synthetic nucleic acid
  source 1..158: mol_type = other DNA
cagacgacggccagtgtcgacatgagtactgaaatcaaaactcaggtcgtggtacttggggcaggcaacacttcttgcggcgatggttcctggctcttcgatcccgacctgccgaacccgaaagcgaagaagaaggaaggatcctacggtcattcagc

SEQ ID NO: 621 - DNA, 158 bp, synthetic construct
  misc_feature 1..158: note = Synthetic nucleic acid
  source 1..158: mol_type = other DNA
cagacgacggccagtgtcgacatgagtcgtttagtcgtagtatctaaccggattgcaccaccaaacacttcttgcggcgatggttcctggctcttcgatcagcgcgataaagttgctacctttccaaagcttgcgccaggatcctacggtcattcagc

SEQ ID NO: 622 - DNA, 158 bp, synthetic construct
  misc_feature 1..158: note = Synthetic nucleic acid
  source 1..158: mol_type = other DNA
cagacgacggccagtgtcgacatgcaacataagttactgattaacggagaactggttagcggcgaagaacacttcttgcggcgatggttcctggctcttcgatccaccgtcgtccgccacgtcatggttaaacatggcggatcctacggtcattcagc

SEQ ID NO: 623 - DNA, 158 bp, synthetic construct
  misc_feature 1..158: note = Synthetic nucleic acid
  source 1..158: mol_type = other DNA
cagacgacggccagtgtcgacatgcgtatcggcatgcggttgttgctgggctattttttactggtaacacttcttgcggcgatggttcctggctcttcgatcctggcctcgcttcgacttcaccgtcacttcacagacggatcctacggtcattcagc

SEQ ID NO: 624 - DNA, 158 bp, synthetic construct
  misc_feature 1..158: note = Synthetic nucleic acid
  source 1..158: mol_type = other DNA
cagacgacggccagtgtcgacatggccaaagagatcagcagtgaacttctgaacaccattcttaccaacacttcttgcggcgatggttcctggctcttcgatccgctctttggctgccgtaacgtcaatctggacgcaggatcctacggtcattcagc

SEQ ID NO: 625 - DNA, 158 bp, synthetic construct
  misc_feature 1..158: note = Synthetic nucleic acid
  source 1..158: mol_type = other DNA
cagacgacggccagtgtcgacatgtcagtatttccagaaagttttttatggggcggcgcaacacttcttgcggcgatggttcctggctcttcgatctataaaaaagtgattgccagtaatggggaagatttagagcggggatcctacggtcattcagc

SEQ ID NO: 626 - DNA, 158 bp, synthetic construct
  misc_feature 1..158: note = Synthetic nucleic acid
  source 1..158: mol_type = other DNA
cagacgacggccagtgtcgacatgaaaactgatactccctctttagaaacaccgcaggccgcgcgaacacttcttgcggcgatggttcctggctcttcgatccgaagcaaggccgcatcagccagcgagaatacttttggatcctacggtcattcagc

SEQ ID NO: 627 - DNA, 158 bp, synthetic construct
  misc_feature 1..158: note = Synthetic nucleic acid
  source 1..158: mol_type = other DNA
cagacgacggccagtgtcgacatgagcatttcaatgactacaaaactcagttatggatttggagcgttcgaacacttcttgcggcgatggttcctggctcttcgatcggtcggtgcagtgagtgatgtgaaagccgttggatcctacggtcattcagc

SEQ ID NO: 628 - DNA, 158 bp, synthetic construct
  misc_feature 1..158: note = Synthetic nucleic acid
  source 1..158: mol_type = other DNA
cagacgacggccagtgtcgacatgatgagcaaaataaaccaaacggatatcgatcggttgattgaactggtaacacttcttgcggcgatggttcctggctcttcgatctaccgcctgggcacgctggacattgttactggatcctacggtcattcagc

SEQ ID NO: 629 - DNA, 158 bp, synthetic construct
  misc_feature 1..158: note = Synthetic nucleic acid
  source 1..158: mol_type = other DNA
cagacgacggccagtgtcgacttgccccggctggcgagcgcggtgctgccactaacacttcttgcggcgatggttcctggctcttcgatcgttatggtcagactggcgtcgatattgcccgtggaatggttattgtacggatcctacggtcattcagc

SEQ ID NO: 630 - DNA, 158 bp, synthetic construct
  misc_feature 1..158: note = Synthetic nucleic acid
  source 1..158: mol_type = other DNA
cagacgacggccagtgtcgacatgactacccatctggtctggtttcgccaggatttacgtctgcacgataataacacttcttgcggcgatggttcctggctcttcgatccgtatgaggcggcgcggaaggggaaaataggatcctacggtcattcagc

SEQ ID NO: 631 - DNA, 158 bp, synthetic construct
  misc_feature 1..158: note = Synthetic nucleic acid
  source 1..158: mol_type = other DNA
cagacgacggccagtgtcgacatgagccagtcactgtttagccaaccattgaacgttattaacgtcgaacacttcttgcggcgatggttcctggctcttcgatccattcttggctggtgcgaacgttacggcgtcttaggatcctacggtcattcagc

SEQ ID NO: 632 - DNA, 158 bp, synthetic construct
  misc_feature 1..158: note = Synthetic nucleic acid
  source 1..158: mol_type = other DNA
cagacgacggccagtgtcgacatgagtcagaatgtttatcaatttatcgacctgcagcgcgttgataacacttcttgcggcgatggttcctggctcttcgatccggcagacggtattatgaactggctggaagttgggggatcctacggtcattcagc

SEQ ID NO: 633 - DNA, 158 bp, synthetic construct
  misc_feature 1..158: note = Synthetic nucleic acid
  source 1..158: mol_type = other DNA
cagacgacggccagtgtcgacatgcaggaaaatatatcagtaaccgattcatacagcaccgggaatgcaacacttcttgcggcgatggttcctggctcttcgatccaagaggcacaacatggccgacgttcacgacacggatcctacggtcattcagc

SEQ ID NO: 634 - DNA, 158 bp, synthetic construct
  misc_feature 1..158: note = Synthetic nucleic acid
  source 1..158: mol_type = other DNA
cagacgacggccagtgtcgacatggaaaccaatatcgttgaagtagagaactttgttcagcagtcagaagaaacacttcttgcggcgatggttcctggctcttcgatcgaaattgagtggatgttgaaaaacgcgaagggatcctacggtcattcagc

SEQ ID NO: 635 - DNA, 158 bp, synthetic construct
  misc_feature 1..158: note = Synthetic nucleic acid
  source 1..158: mol_type = other DNA
cagacgacggccagtgtcgacatggcaacgttcggggcgtgccggttttttttcggttaccaacacttcttgcggcgatggttcctggctcttcgatcggcgcaggaaacacataacgatcccgcaccgcaacatccgggatcctacggtcattcagc

SEQ ID NO: 636 - DNA, 158 bp, synthetic construct
  misc_feature 1..158: note = Synthetic nucleic acid
  source 1..158: mol_type = other DNA
cagacgacggccagtgtcgacatggtaaacctggtcatagtttcacatagcagccgactgggaaacacttcttgcggcgatggttcctggctcttcgatctggacgttaaaacgcaacgtttcaaccgtcagggtcctggatcctacggtcattcagc

SEQ ID NO: 637 - DNA, 158 bp, synthetic construct
  misc_feature 1..158: note = Synthetic nucleic acid
  source 1..158: mol_type = other DNA
cagacgacggccagtgtcgacatggttactatcaatacggaatctgctttaacgccacgttctttgcaacacttcttgcggcgatggttcctggctcttcgatcggcaggcgagaagttgagaaatatcggcgtccctggatcctacggtcattcagc

SEQ ID NO: 638 - DNA, 158 bp, synthetic construct
  misc_feature 1..158: note = Synthetic nucleic acid
  source 1..158: mol_type = other DNA
cagacgacggccagtgtcgacatgaaaatcaaaactcgcttcgcgccaagcccaacaaacacttcttgcggcgatggttcctggctcttcgatcacaaagcgctggattttattgctgaacgcgaaaatcagcagcgaggatcctacggtcattcagc

SEQ ID NO: 639 - DNA, 158 bp, synthetic construct
  misc_feature 1..158: note = Synthetic nucleic acid
  source 1..158: mol_type = other DNA
cagacgacggccagtgtcgacatgacagatcttcccgacagcacccgttggcaattgtgaacacttcttgcggcgatggttcctggctcttcgatccaaaatgtagctatttcgcggcgaaaaaggagcgcgcaatgtggatcctacggtcattcagc

SEQ ID NO: 640 - DNA, 158 bp, synthetic construct
  misc_feature 1..158: note = Synthetic nucleic acid
  source 1..158: mol_type = other DNA
cagacgacggccagtgtcgacatggaaaactttaaacatctccctgaaccgttccgcattcgtaacacttcttgcggcgatggttcctggctcttcgatctattgcgtcacttcaccgcaaaacttaaagaagttagaggatcctacggtcattcagc

SEQ ID NO: 641 - DNA, 158 bp, synthetic construct
  misc_feature 1..158: note = Synthetic nucleic acid
  source 1..158: mol_type = other DNA
cagacgacggccagtgtcgacatggcaggaaataaacccttcaacaaacagcaggctgaaccccgaacacttcttgcggcgatggttcctggctcttcgatcgacaactatgcggggccgcagtacgacgacgaagtgggatcctacggtcattcagc

SEQ ID NO: 642 - DNA, 158 bp, synthetic construct
  misc_feature 1..158: note = Synthetic nucleic acid
  source 1..158: mol_type = other DNA
cagacgacggccagtgtcgacgtgaaacaaagcactattgcactggcactcttaccgttactgtttaaacacttcttgcggcgatggttcctggctcttcgatcctacaccatgaaagccgctctggggctgaaacatggatcctacggtcattcagc

SEQ ID NO: 643 - DNA, 158 bp, synthetic construct
  misc_feature 1..158: note = Synthetic nucleic acid
  source 1..158: mol_type = other DNA
cagacgacggccagtgtcgacatgaaaaagaccaaaattgtttgcaccatcggaccgaaaaccgaataacacttcttgcggcgatggttcctggctcttcgatccactactaacaccgcatctgttcacgtcctggcgggatcctacggtcattcagc

SEQ ID NO: 644 - DNA, 158 bp, synthetic construct
  misc_feature 1..158: note = Synthetic nucleic acid
  source 1..158: mol_type = other DNA
cagacgacggccagtgtcgacatgaaagcatttccagaaacatttctttggggtggcgcaaaacacttcttgcggcgatggttcctggctcttcgatcggggctgtcattaaaaaaaataaccattaaagcacctgcgggatcctacggtcattcagc

SEQ ID NO: 645 - DNA, 158 bp, synthetic construct
  misc_feature 1..158: note = Synthetic nucleic acid
  source 1..158: mol_type = other DNA
cagacgacggccagtgtcgacatgacgcgttatcaacatctggcgactctgcttgccgaacaacacttcttgcggcgatggttcctggctcttcgatcgaagcaaattggcgaggccgtgtatcgggcaatggaattgggatcctacggtcattcagc

SEQ ID NO: 646 - DNA, 158 bp, synthetic construct
  misc_feature 1..158: note = Synthetic nucleic acid
  source 1..158: mol_type = other DNA
cagacgacggccagtgtcgacatgactccgtttatgactgaagatttcctgttagataccgaatttgccaacacttcttgcggcgatggttcctggctcttcgatccgcgtgactacttcgccattgaactgaacagtggatcctacggtcattcagc

SEQ ID NO: 647 - DNA, 158 bp, synthetic construct
  misc_feature 1..158: note = Synthetic nucleic acid
  source 1..158: mol_type = other DNA
cagacgacggccagtgtcgacatggtagatcaggtaaaagtcgttgccgatgatcaggctccaacacttcttgcggcgatggttcctggctcttcgatctttattggtaagaagcgggctgctgaactgcggaaatttggatcctacggtcattcagc

SEQ ID NO: 648 - DNA, 158 bp, synthetic construct
  misc_feature 1..158: note = Synthetic nucleic acid
  source 1..158: mol_type = other DNA
cagacgacggccagtgtcgacatgtcactcagtcggcgtcagttcattcaggcatcggggattaacacttcttgcggcgatggttcctggctcttcgatcgctcgattgggcaactgttggtcaatccggtaccgaatggatcctacggtcattcagc

SEQ ID NO: 649 - DNA, 158 bp, synthetic construct
  misc_feature 1..158: note = Synthetic nucleic acid
  source 1..158: mol_type = other DNA
cagacgacggccagtgtcgacatgcaacgagggatagtctgggtagtcgatgacgatagttccataacacttcttgcggcgatggttcctggctcttcgatcctgacgcgtaagttaaaagagctggggatggagcctggatcctacggtcattcagc

SEQ ID NO: 650 - DNA, 158 bp, synthetic construct
  misc_feature 1..158: note = Synthetic nucleic acid
  source 1..158: mol_type = other DNA
cagacgacggccagtgtcgacatgtccgctgaacacgtactgacgatgctgaacgagcaaacacttcttgcggcgatggttcctggctcttcgatcactccgcatccggtagagtttgagctgtactacagcgtccacggatcctacggtcattcagc

SEQ ID NO: 651 - DNA, 158 bp, synthetic construct
  misc_feature 1..158: note = Synthetic nucleic acid
  source 1..158: mol_type = other DNA
cagacgacggccagtgtcgacatgaaaaaataccagcagcttgcagaacaattacgcgagcaaacacttcttgcggcgatggttcctggctcttcgatcgtaaaacaattaggcaaacttattcaagaacggctgacgggatcctacggtcattcagc

SEQ ID NO: 652 - DNA, 158 bp, synthetic construct
  misc_feature 1..158: note = Synthetic nucleic acid
  source 1..158: mol_type = other DNA
cagacgacggccagtgtcgacatgcgtacgtttagtggcaaacgtagtacgctggcaacacttcttgcggcgatggttcctggctcttcgatccgtgacgtgaaatttatggtaatcgcaccattcaccatcttctctggatcctacggtcattcagc

SEQ ID NO: 653 - DNA, 158 bp, synthetic construct
  misc_feature 1..158: note = Synthetic nucleic acid
  source 1..158: mol_type = other DNA
cagacgacggccagtgtcgacatggcaagtatttcatcgctgggagtcgggtcagaacacttcttgcggcgatggttcctggctcttcgatccagctacttaacgcagcagttcgaaaacaacagtaattccaagtggggatcctacggtcattcagc

SEQ ID NO: 654 - DNA, 158 bp, synthetic construct
  misc_feature 1..158: note = Synthetic nucleic acid
  source 1..158: mol_type = other DNA
cagacgacggccagtgtcgacatgtccaagcaacagatcggcgtagtcggtatggcaaacacttcttgcggcgatggttcctggctcttcgatcgtattgataaagaaggtgtgttccataccgaatggctggatctgggatcctacggtcattcagc

SEQ ID NO: 655 - DNA, 158 bp, synthetic construct
  misc_feature 1..158: note = Synthetic nucleic acid
  source 1..158: mol_type = other DNA
cagacgacggccagtgtcgacatgaagttctggcgacccggtattaccggcaaaaacacttcttgcggcgatggttcctggctcttcgatcttacagtagagttaccgctggaacgggatttacagagagaagtaatgggatcctacggtcattcagc

SEQ ID NO: 656 - DNA, 158 bp, synthetic construct
  misc_feature 1..158: note = Synthetic nucleic acid
  source 1..158: mol_type = other DNA
cagacgacggccagtgtcgacatgaatacagtacgcagcgaaaaagattcgatgggggcgattgatgtaacacttcttgcggcgatggttcctggctcttcgatccagatggtcggcagtatgaaagccgggcgtgtaggatcctacggtcattcagc

SEQ ID NO: 657 - DNA, 158 bp, synthetic construct
  misc_feature 1..158: note = Synthetic nucleic acid
  source 1..158: mol_type = other DNA
cagacgacggccagtgtcgacatgaatcaacaggatattgaacaggtggtgaaagcggtactgctaacacttcttgcggcgatggttcctggctcttcgatccgctgtgtattagtcgatgcgtttcgcattgtttggggatcctacggtcattcagc

SEQ ID NO: 658 - DNA, 158 bp, synthetic construct
  misc_feature 1..158: note = Synthetic nucleic acid
  source 1..158: mol_type = other DNA
cagacgacggccagtgtcgacatgcaaacaacacaacaaaatgcgccactgaagcgcacaataacacttcttgcggcgatggttcctggctcttcgatccgaaacgcaaaacaggagccagaacatgtcgcagaatacggatcctacggtcattcagc

SEQ ID NO: 659 - DNA, 158 bp, synthetic construct
  misc_feature 1..158: note = Synthetic nucleic acid
  source 1..158: mol_type = other DNA
cagacgacggccagtgtcgacatgtctgaccataatccactgacattaaaactgaatctgcgggaaaaaataacacttcttgcggcgatggttcctggctcttcgatcgaagaaaaaacggcttccgtaacgttagccggatcctacggtcattcagc

SEQ ID NO: 660 - DNA, 158 bp, synthetic construct
  misc_feature 1..158: note = Synthetic nucleic acid
  source 1..158: mol_type = other DNA
cagacgacggccagtgtcgacgtgaacactcgccagctattgagcgtcggtatcgatatcggaacacttcttgcggcgatggttcctggctcttcgatcgtgccggtgacggtgaaatcactcgcatttccttccaacggatcctacggtcattcagc

SEQ ID NO: 661 - DNA, 158 bp, synthetic construct
  misc_feature 1..158: note = Synthetic nucleic acid
  source 1..158: mol_type = other DNA
cagacgacggccagtgtcgacgtgtcactttcgctttggcagcagtgtcttgcaacacttcttgcggcgatggttcctggctcttcgatcgatatcaaagaagatttttcaaatttaatcagaacattgtcatcgggaggatcctacggtcattcagc

SEQ ID NO: 662 - DNA, 158 bp, synthetic construct
  misc_feature 1..158: note = Synthetic nucleic acid
  source 1..158: mol_type = other DNA
cagacgacggccagtgtcgacatgagcgttgtgcctgtagccgacgtactccagggccaacacttcttgcggcgatggttcctggctcttcgatctgtgattccgttcccacgtactccgcgtaacgccagcttcggcggatcctacggtcattcagc

SEQ ID NO: 663 - DNA, 158 bp, synthetic construct
  misc_feature 1..158: note = Synthetic nucleic acid
  source 1..158: mol_type = other DNA
cagacgacggccagtgtcgacatgccacattcctacgattacgatgccatagtaataggttccgaacacttcttgcggcgatggttcctggctcttcgatcggtagctgcgttaaacggtttaaaccgcctgttttccggatcctacggtcattcagc

SEQ ID NO: 664 - DNA, 158 bp, synthetic construct
  misc_feature 1..158: note = Synthetic nucleic acid
  source 1..158: mol_type = other DNA
cagacgacggccagtgtcgacatggaccagaagctgttaacggatttccgctcagaactactaacacttcttgcggcgatggttcctggctcttcgatccagggtattgcccagcagaacagctttaaacacacctttggatcctacggtcattcagc

SEQ ID NO: 665 - DNA, 158 bp, synthetic construct
  misc_feature 1..158: note = Synthetic nucleic acid
  source 1..158: mol_type = other DNA
cagacgacggccagtgtcgacatggataagaagcaagtaacggatttaaggtcggaactactcgattcaaacacttcttgcggcgatggttcctggctcttcgatcttgcccaacagaacagctttaaacatacccccggatcctacggtcattcagc

SEQ ID NO: 666 - DNA, 158 bp, synthetic construct
  misc_feature 1..158: note = Synthetic nucleic acid
  source 1..158: mol_type = other DNA
cagacgacggccagtgtcgacatggctaagacgttatacgaaaaattgttcgacgctcacgttgtaacacttcttgcggcgatggttcctggctcttcgatcaccggacatttcgccgacattcgcaacattaaatttggatcctacggtcattcagc

SEQ ID NO: 667 - DNA, 158 bp, synthetic construct
  misc_feature 1..158: note = Synthetic nucleic acid
  source 1..158: mol_type = other DNA
cagacgacggccagtgtcgacatggggcaatcatcgcaaccacatgagttaggcggaacacttcttgcggcgatggttcctggctcttcgatcaagctggtattgtggcaaaaaacacccgttcataatacgcgcctaggatcctacggtcattcagc

SEQ ID NO: 668 - DNA, 158 bp, synthetic construct
  misc_feature 1..158: note = Synthetic nucleic acid
  source 1..158: mol_type = other DNA
cagacgacggccagtgtcgacatgaaaatggtctcacgtattaccgcgatcggcctggaacacttcttgcggcgatggttcctggctcttcgatctctgaacggggtgtacacgccgtatatgcaggataaacaaccaggatcctacggtcattcagc

SEQ ID NO: 669 - DNA, 158 bp, synthetic construct
  misc_feature 1..158: note = Synthetic nucleic acid
  source 1..158: mol_type = other DNA
cagacgacggccagtgtcgacatgaagcgacttaaaaatgaactcaatgcgctggtgaatcgaacacttcttgcggcgatggttcctggctcttcgatcgctgcgctggaatttttaataggagataaattgcgaataggatcctacggtcattcagc

SEQ ID NO: 670 - DNA, 158 bp, synthetic construct
  misc_feature 1..158: note = Synthetic nucleic acid
  source 1..158: mol_type = other DNA
cagacgacggccagtgtcgacatgcgttttatgcaacgttctaaagactccttagctaaatggttaagcgaacacttcttgcggcgatggttcctggctcttcgatccaatattacgcgtaaggacccacaaggaaaaggatcctacggtcattcagc

SEQ ID NO: 671 - DNA, 158 bp, synthetic construct
  misc_feature 1..158: note = Synthetic nucleic acid
  source 1..158: mol_type = other DNA
cagacgacggccagtgtcgacatggagatcctctacaacatctttaccgtgttttttaaccaggtcatgaaacacttcttgcggcgatggttcctggctcttcgatcagaaaaacaactggcagaacagtctgctacaggatcctacggtcattcagc

SEQ ID NO: 672 - DNA, 158 bp, synthetic construct
  misc_feature 1..158: note = Synthetic nucleic acid
  source 1..158: mol_type = other DNA
cagacgacggccagtgtcgacatttttacccgagtcgctaatttttgccgcaaggtgctaagccgcgaaacacttcttgcggcgatggttcctggctcttcgatcaaacgcgcaccacgtcgtgagggtaccgcatttggatcctacggtcattcagc

SEQ ID NO: 673 - DNA, 158 bp, synthetic construct
  misc_feature 1..158: note = Synthetic nucleic acid
  source 1..158: mol_type = other DNA
cagacgacggccagtgtcgacatgacaaatctaaaaaagcgcgagcgagcgaaaaccaataacacttcttgcggcgatggttcctggctcttcgatctgacggtgttcaaaggtttcgttaacaaagcggcatataggggatcctacggtcattcagc

SEQ ID NO: 674 - DNA, 158 bp, synthetic construct
  misc_feature 1..158: note = Synthetic nucleic acid
  source 1..158: mol_type = other DNA
cagacgacggccagtgtcgacatgagtgcggggaaattgccggaggggtgggttatcaacacttcttgcggcgatggttcctggctcttcgatcgcgcagctagcgggggtaaaaaagcctcacgtaaaaaatccttgggatcctacggtcattcagc

SEQ ID NO: 675 - DNA, 158 bp, synthetic construct
  misc_feature 1..158: note = Synthetic nucleic acid
  source 1..158: mol_type = other DNA
cagacgacggccagtgtcgacatgccatttaaaaaactctcccgacgcacgttcctaacacttcttgcggcgatggttcctggctcttcgatcaatgtggagaagattaactttagattgccggaactgagggaggcaggatcctacggtcattcagc

SEQ ID NO: 676 - DNA, 158 bp, synthetic construct
  misc_feature 1..158: note = Synthetic nucleic acid
  source 1..158: mol_type = other DNA
cagacgacggccagtgtcgacatgcctgacgctaaaaaacaggggcggtcaaacaaggcaataacacttcttgcggcgatggttcctggctcttcgatcaaaggtcgtaaactgcgcgaaataggcgctcacgatccaggatcctacggtcattcagc

SEQ ID NO: 677 - DNA, 158 bp, synthetic construct
  misc_feature 1..158: note = Synthetic nucleic acid
  source 1..158: mol_type = other DNA
cagacgacggccagtgtcgacttgagccgtttcgttcctcgcattatcccgttttatttactcttgcttaacacttcttgcggcgatggttcctggctcttcgatctgtcaaacgacgaactgcgctgggaaccgctaggatcctacggtcattcagc

SEQ ID NO: 678 - DNA, 158 bp, synthetic construct
  misc_feature 1..158: note = Synthetic nucleic acid
  source 1..158: mol_type = other DNA
cagacgacggccagtgtcgacatgaactttccattaattgcgaacatcgtggtgttcgttgtactgctgtttaacacttcttgcggcgatggttcctggctcttcgatcaagacgacgccgaactggcacaccatccaggatcctacggtcattcagc

SEQ ID NO: 679 - DNA, 158 bp, synthetic construct
  misc_feature 1..158: note = Synthetic nucleic acid
  source 1..158: mol_type = other DNA
cagacgacggccagtgtcgacatgacaaccgaaacgcgttccctctatagtcaacttccaacacttcttgcggcgatggttcctggctcttcgatccttgaagatgagcaacggtttttggagatgttgttgaaactaggatcctacggtcattcagc

SEQ ID NO: 680 - DNA, 158 bp, synthetic construct
  misc_feature 1..158: note = Synthetic nucleic acid
  source 1..158: mol_type = other DNA
cagacgacggccagtgtcgacatgagtcactcatccgcccccgaaagggctactaacacttcttgcggcgatggttcctggctcttcgatcgcgtagtgattacctgggcggtatatggtcggcattctaaaaaacgtggatcctacggtcattcagc

SEQ ID NO: 681 - DNA, 158 bp, synthetic construct
  misc_feature 1..158: note = Synthetic nucleic acid
  source 1..158: mol_type = other DNA
cagacgacggccagtgtcgacatgctggctttcttaaaccaggttcgcaagccgaccctaacacttcttgcggcgatggttcctggctcttcgatcatccgccgcgagaaaaaaattcagcagttgacagtggcaataggatcctacggtcattcagc

SEQ ID NO: 682 - DNA, 158 bp, synthetic construct
  misc_feature 1..158: note = Synthetic nucleic acid
  source 1..158: mol_type = other DNA
cagacgacggccagtgtcgacatgtctgtttccaccctcgagtcagaaaatgcgcaacaacacttcttgcggcgatggttcctggctcttcgatctgccatcgtgctgaatctgattttcccaccagaaaaacaggtgggatcctacggtcattcagc

SEQ ID NO: 683 - DNA, 158 bp, synthetic construct
  misc_feature 1..158: note = Synthetic nucleic acid
  source 1..158: mol_type = other DNA
cagacgacggccagtgtcgacatgaccattactccggcaactcatgcaatttcgataaatcctgaacacttcttgcggcgatggttcctggctcttcgatcctgtaatatccagacggtgtggaaagaccggatcagtggatcctacggtcattcagc

SEQ ID NO: 684 - DNA, 158 bp, synthetic construct
  misc_feature 1..158: note = Synthetic nucleic acid
  source 1..158: mol_type = other DNA
cagacgacggccagtgtcgacatggaaaacaagtctgctcgtgcaaaggtccaggaacacttcttgcggcgatggttcctggctcttcgatcactcgacactttatttaatcaattaaccgccgaacataaacacagtggatcctacggtcattcagc

SEQ ID NO: 685 - DNA, 158 bp, synthetic construct
  misc_feature 1..158: note = Synthetic nucleic acid
  source 1..158: mol_type = other DNA
cagacgacggccagtgtcgacatggcactgcaaaatgagaaaaatagtcgttatcttttgcgcgaaacacttcttgcggcgatggttcctggctcttcgatcctggtttatggtcggcggaagttcagccaaaaagtgggatcctacggtcattcagc

SEQ ID NO: 686 - DNA, 158 bp, synthetic construct
  misc_feature 1..158: note = Synthetic nucleic acid
  source 1..158: mol_type = other DNA
cagacgacggccagtgtcgacatgtctggaggattagttacagctgcatacattgttgccgcgataacacttcttgcggcgatggttcctggctcttcgatcaaagccagcgtggatgcaatcctgaaagctctgtccggatcctacggtcattcagc

SEQ ID NO: 687 - DNA, 158 bp, synthetic construct
  misc_feature 1..158: note = Synthetic nucleic acid
  source 1..158: mol_type = other DNA
cagacgacggccagtgtcgacatgaatattccacagctcactgccctgtgtctgcgttatcatggagtcttaacacttcttgcggcgatggttcctggctcttcgatccgcgtactggggatgccgcatggcgaggacggatcctacggtcattcagc

SEQ ID NO: 688 - DNA, 158 bp, synthetic construct
  misc_feature 1..158: note = Synthetic nucleic acid
  source 1..158: mol_type = other DNA
cagacgacggccagtgtcgacatgactgctattaatcgcatccttattgtggatgatgaagataatgttcgcaacacttcttgcggcgatggttcctggctcttcgatcaatacggtatcgatccggcggatgtaggtggatcctacggtcattcagc

SEQ ID NO: 689 - DNA, 158 bp, synthetic construct
  misc_feature 1..158: note = Synthetic nucleic acid
  source 1..158: mol_type = other DNA
cagacgacggccagtgtcgacatgagtcacatcacaacggaagatccagcaactttacgcctgcaacacttcttgcggcgatggttcctggctcttcgatctgtggaagagatagaagcccgtaaacgcacggcgctgggatcctacggtcattcagc

SEQ ID NO: 690 - DNA, 158 bp, synthetic construct
  misc_feature 1..158: note = Synthetic nucleic acid
  source 1..158: mol_type = other DNA
cagacgacggccagtgtcgacatgcgcgtattgatcaaaaacggcactgtcgttaacgcagatggacaaaacacttcttgcggcgatggttcctggctcttcgatcgacgcaaaccgtttgtccctcccgtgctcggtggatcctacggtcattcagc

SEQ ID NO: 691 - DNA, 158 bp, synthetic construct
  misc_feature 1..158: note = Synthetic nucleic acid
  source 1..158: mol_type = other DNA
cagacgacggccagtgtcgacatgctaaaaatcttcaatactctgacacgccaaaaagaggaatttaagcctattcaaacacttcttgcggcgatggttcctggctcttcgatcgggaccacctggcgtcgtaagtatggatcctacggtcattcagc

SEQ ID NO: 692 - DNA, 158 bp, synthetic construct
  misc_feature 1..158: note = Synthetic nucleic acid
  source 1..158: mol_type = other DNA
cagacgacggccagtgtcgacatgctgacattcattgagctccttattggggttgtggttattgtgggtgtaaacacttcttgcggcgatggttcctggctcttcgatcgaacggcagcagcggtcacaggcaaggcaggatcctacggtcattcagc

SEQ ID NO: 693 - DNA, 158 bp, synthetic construct
  misc_feature 1..158: note = Synthetic nucleic acid
  source 1..158: mol_type = other DNA
cagacgacggccagtgtcgacatggcagataacaaaccagagctacagcgtgggctggaaaacacttcttgcggcgatggttcctggctcttcgatcgccttaatcgccacgggaaagcgcataaactggaggaatacggatcctacggtcattcagc

SEQ ID NO: 694 - DNA, 158 bp, synthetic construct
  misc_feature 1..158: note = Synthetic nucleic acid
  source 1..158: mol_type = other DNA
cagacgacggccagtgtcgacatggctattaattcaccactgaatattgctgcgcaacccggaacacttcttgcggcgatggttcctggctcttcgatcttgtatgatggtgacagaacgccggtgagtgaaacgctaggatcctacggtcattcagc

SEQ ID NO: 695 - DNA, 158 bp, synthetic construct
  misc_feature 1..158: note = Synthetic nucleic acid
  source 1..158: mol_type = other DNA
cagacgacggccagtgtcgacatgaaagaaagcaatagccgccgtgaatttctgagccagagcggtaagataacacttcttgcggcgatggttcctggctcttcgatccaactggtgtgggggagtgtggcaggtgcaggatcctacggtcattcagc

SEQ ID NO: 696 - DNA, 158 bp, synthetic construct
  misc_feature 1..158: note = Synthetic nucleic acid
  source 1..158: mol_type = other DNA
cagacgacggccagtgtcgacatgaagagtgaagtgttgtccgttaaagagaaaattggttatggcatggaacacttcttgcggcgatggttcctggctcttcgatcacaattcacctctcaagaagtgcagaaccgtggatcctacggtcattcagc

SEQ ID NO: 697 - DNA, 158 bp, synthetic construct
  misc_feature 1..158: note = Synthetic nucleic acid
  source 1..158: mol_type = other DNA
cagacgacggccagtgtcgacatgacgcaattaaccatgaaagacaaaattggctacgggctgggagacaccgaacacttcttgcggcgatggttcctggctcttcgatccgacgccgcgacagccgcatcccattgcggatcctacggtcattcagc

SEQ ID NO: 698 - DNA, 158 bp, synthetic construct
  misc_feature 1..158: note = Synthetic nucleic acid
  source 1..158: mol_type = other DNA
cagacgacggccagtgtcgacatggaaaagaaactgggactgagcgcactcaccgcgctggtattaaaacacttcttgcggcgatggttcctggctcttcgatcctcagttccggcgacctggatgctggtgggacgaggatcctacggtcattcagc

SEQ ID NO: 699 - DNA, 158 bp, synthetic construct
  misc_feature 1..158: note = Synthetic nucleic acid
  source 1..158: mol_type = other DNA
cagacgacggccagtgtcgacatggagatgtattttaaaagaatgaaagatgagtggaccggacttgtcgaaaacacttcttgcggcgatggttcctggctcttcgatcgtgttgaactctggaaagccagtctttacggatcctacggtcattcagc

SEQ ID NO: 700 - DNA, 158 bp, synthetic construct
  misc_feature 1..158: note = Synthetic nucleic acid
  source 1..158: mol_type = other DNA
cagacgacggccagtgtcgacatggctactggaaagattgtccaggtaatcggcgccaacacttcttgcggcgatggttcctggctcttcgatctcggttccatcgaagaagctgtggaaaaagccaaaaaacttcagggatcctacggtcattcagc

SEQ ID NO: 701 - DNA, 158 bp, synthetic construct
  misc_feature 1..158: note = Synthetic nucleic acid
  source 1..158: mol_type = other DNA
cagacgacggccagtgtcgacgtggcaaaagctccaaaacgcgcctttgtttgtaatgaatgcgaacacttcttgcggcgatggttcctggctcttcgatcactctccgacgcgcttagcgtgttcgacgacttaagtggatcctacggtcattcagc

SEQ ID NO: 702 - DNA, 158 bp, synthetic construct
  misc_feature 1..158: note = Synthetic nucleic acid
  source 1..158: mol_type = other DNA
cagacgacggccagtgtcgacatgccgcctggcgtcgcggtttgtttttcatctctcttcatcaaacacttcttgcggcgatggttcctggctcttcgatctcactggcgcaatggtacctggtttgccgcaacggtgggatcctacggtcattcagc

SEQ ID NO: 703 - DNA, 158 bp, synthetic construct
  misc_feature 1..158: note = Synthetic nucleic acid
  source 1..158: mol_type = other DNA
cagacgacggccagtgtcgacatggaacagataacaaaaccgcattgtggtgcacggaacacttcttgcggcgatggttcctggctcttcgatctctccgttgaaagtttaagtattgatgcagtagccaataaagacggatcctacggtcattcagc

SEQ ID NO: 704 - DNA, 158 bp, synthetic construct
  misc_feature 1..158: note = Synthetic nucleic acid
  source 1..158: mol_type = other DNA
cagacgacggccagtgtcgacttgaacaggttaccttcgagcgcatcggctttagcgtgcagcaacacttcttgcggcgatggttcctggctcttcgatccgctggcggccatgcgagtaagtgtcgaagaagcgctaggatcctacggtcattcagc

SEQ ID NO: 705 - DNA, 158 bp, synthetic construct
  misc_feature 1..158: note = Synthetic nucleic acid
  source 1..158: mol_type = other DNA
cagacgacggccagtgtcgacatgaaaattatcattctgggtgccggccaggttggcggaacacttcttgcggcgatggttcctggctcttcgatcgacgtcgaaagactcttccagccaagccctttcttcttgtcgggatcctacggtcattcagc

SEQ ID NO: 706 - DNA, 158 bp, synthetic construct
  misc_feature 1..158: note = Synthetic nucleic acid
  source 1..158: mol_type = other DNA
cagacgacggccagtgtcgacgtgaaaaacgcgtcaaccgtatcggaagatactgcgtaacacttcttgcggcgatggttcctggctcttcgatctgtattcctgtttatggcatttaaaacgctgcgtcggaaagtgggatcctacggtcattcagc

SEQ ID NO: 707 - DNA, 158 bp, synthetic construct
  misc_feature 1..158: note = Synthetic nucleic acid
  source 1..158: mol_type = other DNA
cagacgacggccagtgtcgacatgaatcaacaactctcctggcgcaccatcgtcaacacttcttgcggcgatggttcctggctcttcgatcatcgtaaaaaagtgcagcagcaattaatcagcgatatcactaatgtgggatcctacggtcattcagc

SEQ ID NO: 708 - DNA, 158 bp, synthetic construct
  misc_feature 1..158: note = Synthetic nucleic acid
  source 1..158: mol_type = other DNA
cagacgacggccagtgtcgacatgaccacgcgcctgactcgctggctaaccacgctaacacttcttgcggcgatggttcctggctcttcgatcgcgtctctccaggggctggagcgtattttcccgacagtgtcacctggatcctacggtcattcagc

SEQ ID NO: 709 - DNA, 158 bp, synthetic construct
  misc_feature 1..158: note = Synthetic nucleic acid
  source 1..158: mol_type = other DNA
cagacgacggccagtgtcgacatgataggcagcttaaccgcgcgcatcttcgccatcttaacacttcttgcggcgatggttcctggctcttcgatcttacggctggtgatttggttgccgctgtataagcggagtcctggatcctacggtcattcagc

SEQ ID NO: 710 - DNA, 158 bp, synthetic construct
  misc_feature 1..158: note = Synthetic nucleic acid
  source 1..158: mol_type = other DNA
cagacgacggccagtgtcgacatgatggaaggtcaacagcacggcgagcagctaaaaacacttcttgcggcgatggttcctggctcttcgatctatctgtttaaagagaaaaccgccaaagccgtaaaagcgcattctggatcctacggtcattcagc

SEQ ID NO: 711 - DNA, 158 bp, synthetic construct
  misc_feature 1..158: note = Synthetic nucleic acid
  source 1..158: mol_type = other DNA
cagacgacggccagtgtcgacatgccaaaagttcaggccgacggcctgccattgcaacacttcttgcggcgatggttcctggctcttcgatcctgtgtcagtggtttacgtatcactcagccacgatccagggcagtgggatcctacggtcattcagc

SEQ ID NO: 712 - DNA, 158 bp, synthetic construct
  misc_feature 1..158: note = Synthetic nucleic acid
  source 1..158: mol_type = other DNA
cagacgacggccagtgtcgacatgcgcattcatattttaggaatttgtggcacatttatgggcggtctggcgataacacttcttgcggcgatggttcctggctcttcgatcgcgaagaaggcggaagccgcgcagacaggatcctacggtcattcagc

SEQ ID NO: 713 - DNA, 158 bp, synthetic construct
  misc_feature 1..158: note = Synthetic nucleic acid
  source 1..158: mol_type = other DNA
cagacgacggccagtgtcgacatggaaagtaagaacaagctaaagcgtgggctaagtacccgccacataaacacttcttgcggcgatggttcctggctcttcgatcgccacgatcgtcagctggctgaaaaccagagcggatcctacggtcattcagc

SEQ ID NO: 714 - DNA, 158 bp, synthetic construct
  misc_feature 1..158: note = Synthetic nucleic acid
  source 1..158: mol_type = other DNA
cagacgacggccagtgtcgacatggcactttggggcgggcgttttacccaggcagcagatcaaaacacttcttgcggcgatggttcctggctcttcgatccgcaggcgattgcttttgcgcaggctcggttagggagcggatcctacggtcattcagc

SEQ ID NO: 715 - DNA, 158 bp, synthetic construct
  misc_feature 1..158: note = Synthetic nucleic acid
  source 1..158: mol_type = other DNA
cagacgacggccagtgtcgacatgtctccttgtaaacttctgccattttgtgtggcccttaacacttcttgcggcgatggttcctggctcttcgatcttaacgaaatttctttgtataccgcacttggtggcggtcatggatcctacggtcattcagc

SEQ ID NO: 716 - DNA, 158 bp, synthetic construct
  misc_feature 1..158: note = Synthetic nucleic acid
  source 1..158: mol_type = other DNA
cagacgacggccagtgtcgacatgtctgtacagcaaatcgactgggatctggccctgatccagaaatataaaacacttcttgcggcgatggttcctggctcttcgatccggatgcagcagttctctcgggtgattggaggatcctacggtcattcagc

SEQ ID NO: 717 - DNA, 158 bp, synthetic construct
  misc_feature 1..158: note = Synthetic nucleic acid
  source 1..158: mol_type = other DNA
cagacgacggccagtgtcgacgtgaccgctttttctaccctgaatgttttgcctcccaacacttcttgcggcgatggttcctggctcttcgatcggaagattaaaggaaaaacgtgccgggtgcggttattaaaaacaggatcctacggtcattcagc

SEQ ID NO: 718 - DNA, 158 bp, synthetic construct
  misc_feature 1..158: note = Synthetic nucleic acid
  source 1..158: mol_type = other DNA
cagacgacggccagtgtcgacgtgcagaagtatatcagtgaagcgcgtctgttattagcattagcaatcaacacttcttgcggcgatggttcctggctcttcgatccagccatcattctgcaacgagcatcccgctcaggatcctacggtcattcagc

SEQ ID NO: 719 - DNA, 158 bp, synthetic construct
  misc_feature 1..158: note = Synthetic nucleic acid
  source 1..158: mol_type = other DNA
cagacgacggccagtgtcgacgtggatcatttgcctatattttgccaattacgcgatcgcgactaacacttcttgcggcgatggttcctggctcttcgatccctgcgcgataaactgaactggttctccaaccataccggatcctacggtcattcagc

SEQ ID NO: 720 - DNA, 158 bp, synthetic construct
  misc_feature 1..158: note = Synthetic nucleic acid
  source 1..158: mol_type = other DNA
cagacgacggccagtgtcgacatgaaaaaattaacctgctttaaagcctatgatattcgcgggaaattaggcgaaaacacttcttgcggcgatggttcctggctcttcgatcctctgctgacgttgctgaacgagccgggatcctacggtcattcagc

SEQ ID NO: 721 - DNA, 158 bp, synthetic construct
  misc_feature 1..158: note = Synthetic nucleic acid
  source 1..158: mol_type = other DNA
cagacgacggccagtgtcgacatggaattatcctcactgaccgccgtttcccctaacacttcttgcggcgatggttcctggctcttcgatcctaactatattggtcgagctatcacgatggttgatgagctgaaaaaaggatcctacggtcattcagc

SEQ ID NO: 722 - DNA, 158 bp, synthetic construct
  misc_feature 1..158: note = Synthetic nucleic acid
  source 1..158: mol_type = other DNA
cagacgacggccagtgtcgacatgttaccttctcaatcccctgcaatttttaccgttagtcgcaacacttcttgcggcgatggttcctggctcttcgatctccagccagtaaaaaaatcgcgtaaaaaggtgcatacaggatcctacggtcattcagc

SEQ ID NO: 723 - DNA, 158 bp, synthetic construct
  misc_feature 1..158: note = Synthetic nucleic acid
  source 1..158: mol_type = other DNA
cagacgacggccagtgtcgacatgttgaataatgctatgagcgtagtgatccttgccgcaggaacacttcttgcggcgatggttcctggctcttcgatccagaaagaaggctggcgtcgtccggtaaagaaaaagcatggatcctacggtcattcagc

SEQ ID NO: 724 - DNA, 158 bp, synthetic construct
  misc_feature 1..158: note = Synthetic nucleic acid
  source 1..158: mol_type = other DNA
cagacgacggccagtgtcgacatgaaaaaacaaacccagctgttgagtgcattagcgttaagtgtcaacacttcttgcggcgatggttcctggctcttcgatcgcggcaatgaaagcatctatctgctgatgcgttggggatcctacggtcattcagc

SEQ ID NO: 725 - DNA, 158 bp, synthetic construct
  misc_feature 1..158: note = Synthetic nucleic acid
  source 1..158: mol_type = other DNA
cagacgacggccagtgtcgacatgattagcgtattcgatattttcaaaatcggcattggcccttccagttaacacttcttgcggcgatggttcctggctcttcgatccctggcaatgaagatcgttgcctgcgatgcaggatcctacggtcattcagc

SEQ ID NO: 726 - DNA, 158 bp, synthetic construct
  misc_feature 1..158: note = Synthetic nucleic acid
  source 1..158: mol_type = other DNA
cagacgacggccagtgtcgacatgtctggagacatcctacaaacaccggacgcaccaaagccaaacacttcttgcggcgatggttcctggctcttcgatccactggtcgcattttacgcgggtggttgggcaatcatgggatcctacggtcattcagc

SEQ ID NO: 727 - DNA, 158 bp, synthetic construct
  misc_feature 1..158: note = Synthetic nucleic acid
  source 1..158: mol_type = other DNA
cagacgacggccagtgtcgacatgaacgattataaaatgacgccaggtgagaggcgcgcaacacttcttgcggcgatggttcctggctcttcgatcacgaatcgctttgagatagaacaggcaattcgtcaggcatacggatcctacggtcattcagc

SEQ ID NO: 728 - DNA, 158 bp, synthetic construct
  misc_feature 1..158: note = Synthetic nucleic acid
  source 1..158: mol_type = other DNA
cagacgacggccagtgtcgacatgagcgataatgacactatcgtagcccaggccacgcaacacttcttgcggcgatggttcctggctcttcgatccctgctggggcggattttctccagcttctgtattggtaaggccggatcctacggtcattcagc

SEQ ID NO: 729 - DNA, 158 bp, synthetic construct
  misc_feature 1..158: note = Synthetic nucleic acid
  source 1..158: mol_type = other DNA
cagacgacggccagtgtcgacatgattagtgcattcgatattttcaaaattgggattggtccctccagttaacacttcttgcggcgatggttcctggctcttcgatcaggactggccattaaagtggtctgcggcattggatcctacggtcattcagc

SEQ ID NO: 730 - DNA, 158 bp, synthetic construct
  misc_feature 1..158: note = Synthetic nucleic acid
  source 1..158: mol_type = other DNA
cagacgacggccagtgtcgacatgtccacaattacattgttatgcattgcgttagctggcgtaataacacttcttgcggcgatggttcctggctcttcgatcttcttaattacctggtgcgtatgggcggtaattcacggatcctacggtcattcagc

SEQ ID NO: 731 - DNA, 158 bp, synthetic construct
  misc_feature 1..158: note = Synthetic nucleic acid
  source 1..158: mol_type = other DNA
cagacgacggccagtgtcgacatgtctttcgattctttgggtttaagccctgatatcctgcgcgccgttgcaacacttcttgcggcgatggttcctggctcttcgatccgtccgcgtaaacctgccgctgcgcagggcggatcctacggtcattcagc

SEQ ID NO: 732 - DNA, 158 bp, synthetic construct
  misc_feature 1..158: note = Synthetic nucleic acid
  source 1..158: mol_type = other DNA
cagacgacggccagtgtcgacgtgattagtctattcgacatgtttaaggtggggattggtccctcataacacttcttgcggcgatggttcctggctcttcgatccggtggtctggcaatcaaagtccagtgtgacccgggatcctacggtcattcagc

SEQ ID NO: 733 - DNA, 158 bp, synthetic construct
  misc_feature 1..158: note = Synthetic nucleic acid
  source 1..158: mol_type = other DNA
cagacgacggccagtgtcgacttgattacacatattagcccgcttggctccatggatatgttgtaacacttcttgcggcgatggttcctggctcttcgatcctcagcctacatcccttgctacgaaatctgcacgtggggatcctacggtcattcagc

SEQ ID NO: 734 - DNA, 158 bp, synthetic construct
  misc_feature 1..158: note = Synthetic nucleic acid
  source 1..158: mol_type = other DNA
cagacgacggccagtgtcgacatgaagacgttatctcccgctgtgattactttactctggcgtaacacttcttgcggcgatggttcctggctcttcgatcataaagttaatcgtatcctgaagcaactggagaagaacggatcctacggtcattcagc

SEQ ID NO: 735 - DNA, 158 bp, synthetic construct
  misc_feature 1..158: note = Synthetic nucleic acid
  source 1..158: mol_type = other DNA
cagacgacggccagtgtcgacatgaccacaccctcagatttgaacatttaccaactgattgacacccaaaataacacttcttgcggcgatggttcctggctcttcgatcccgcttaccagcaggaggtgatgaaacggggatcctacggtcattcagc

SEQ ID NO: 736 - DNA, 158 bp, synthetic construct
  misc_feature 1..158: note = Synthetic nucleic acid
  source 1..158: mol_type = other DNA
cagacgacggccagtgtcgacatgatgcaaaccgttttagcgaaaatcgtcgcagacaaggcgatttgaacacttcttgcggcgatggttcctggctcttcgatcgcctcggttttccagacgctgcgcgcatatttgggatcctacggtcattcagc

SEQ ID NO: 737 - DNA, 158 bp, synthetic construct
  misc_feature 1..158: note = Synthetic nucleic acid
  source 1..158: mol_type = other DNA
cagacgacggccagtgtcgacatgtttaaaccggaactcctttccccggcgggaacgaacacttcttgcggcgatggttcctggctcttcgatcgtaatttctccggggaaaccacgcgtaatccccacggtaaggacggatcctacggtcattcagc

SEQ ID NO: 738 - DNA, 158 bp, synthetic construct
  misc_feature 1..158: note = Synthetic nucleic acid
  source 1..158: mol_type = other DNA
cagacgacggccagtgtcgacatgtttgataatttaaccgatcgtttgtcgcgcacgctgcgcaatataacacttcttgcggcgatggttcctggctcttcgatcggtatgatgcccccaggcttccctggtcgccatggatcctacggtcattcagc

SEQ ID NO: 739 - DNA, 158 bp, synthetic construct
  misc_feature 1..158: note = Synthetic nucleic acid
  source 1..158: mol_type = other DNA
cagacgacggccagtgtcgacgtggaaaaagaaaatatcaccatcgatccgcgttcttcatttactccataacacttcttgcggcgatggttcctggctcttcgatctcagccgatcaacgacccacgtaaagatggaggatcctacggtcattcagc

SEQ ID NO: 740 - DNA, 158 bp, synthetic construct
  misc_feature 1..158: note = Synthetic nucleic acid
  source 1..158: mol_type = other DNA
cagacgacggccagtgtcgacatgaaggcaaaagcgatattactcgcctctgtcctgctaacacttcttgcggcgatggttcctggctcttcgatcctgacgttgtttgtgaaaaacaacaacatgccagattcctctggatcctacggtcattcagc

SEQ ID NO: 741 - DNA, 158 bp, synthetic construct
  misc_feature 1..158: note = Synthetic nucleic acid
  source 1..158: mol_type = other DNA
cagacgacggccagtgtcgacatgagtaatgttattgcatcgcttgaaaaggtactcctcccttttgcaaacacttcttgcggcgatggttcctggctcttcgatcaagaagatatcgctaacgccctgaaatttgccggatcctacggtcattcagc

SEQ ID NO: 742 - DNA, 158 bp, synthetic construct
  misc_feature 1..158: note = Synthetic nucleic acid
  source 1..158: mol_type = other DNA
cagacgacggccagtgtcgacatgattagcgtaacccttagccaacttaccgacattctcaacgaacacttcttgcggcgatggttcctggctcttcgatcggtagtacgcgctttacaggagaatgggacatgtgaaggatcctacggtcattcagc

SEQ ID NO: 743 - DNA, 158 bp, synthetic construct
  misc_feature 1..158: note = Synthetic nucleic acid
  source 1..158: mol_type = other DNA
cagacgacggccagtgtcgacatggaacaatatgatcaaattggcgcaagactggaccgcttaacacttcttgcggcgatggttcctggctcttcgatccggaaggtgtcgttggaagagatttctgaggtgaatgtgggatcctacggtcattcagc

SEQ ID NO: 744 - DNA, 158 bp, synthetic construct
  misc_feature 1..158: note = Synthetic nucleic acid
  source 1..158: mol_type = other DNA
cagacgacggccagtgtcgacatgtcgcataacgttactccaaacacctctcgcgtggaattgaacacttcttgcggcgatggttcctggctcttcgatctccgtaatccggttccgcagtacgaagacgtagcacgtggatcctacggtcattcagc

SEQ ID NO: 745 - DNA, 158 bp, synthetic construct
  misc_feature 1..158: note = Synthetic nucleic acid
  source 1..158: mol_type = other DNA
cagacgacggccagtgtcgacatgttgagtatttttaaaccagcgccacacaaagcgcgcttaaacacttcttgcggcgatggttcctggctcttcgatcgccatgaacaattactgcaagaacgcaacggaggccgaggatcctacggtcattcagc

SEQ ID NO: 746 - DNA, 158 bp, synthetic construct
  misc_feature 1..158: note = Synthetic nucleic acid
  source 1..158: mol_type = other DNA
cagacgacggccagtgtcgacatgatcttctctgactggccgtggcgtcactggcggaacacttcttgcggcgatggttcctggctcttcgatctttcacgtcaggcgctaaaagagtgggtgcaacgtcagcaacacggatcctacggtcattcagc

SEQ ID NO: 747 - DNA, 158 bp, synthetic construct
  misc_feature 1..158: note = Synthetic nucleic acid
  source 1..158: mol_type = other DNA
cagacgacggccagtgtcgacatgatgtctgcacccaaaattacatttatcggcgctggttcgacgattttaacacttcttgcggcgatggttcctggctcttcgatcgactggctgccaggctggttgcaccgtcccggatcctacggtcattcagc

SEQ ID NO: 748 - DNA, 158 bp, synthetic construct
  misc_feature 1..158: note = Synthetic nucleic acid
  source 1..158: mol_type = other DNA
cagacgacggccagtgtcgacatgttgtcaaaatttaagcgtaataaacatcaacaacaccttgcccaactacaacacttcttgcggcgatggttcctggctcttcgatccgaccgattaattagccgcatcctggctggatcctacggtcattcagc

SEQ ID NO: 749 - DNA, 158 bp, synthetic construct
  misc_feature 1..158: note = Synthetic nucleic acid
  source 1..158: mol_type = other DNA
cagacgacggccagtgtcgacatgactaaacactatgattacatcgccatcggcggcggcagcgaacacttcttgcggcgatggttcctggctcttcgatccccaacggcggcagaagagttcgtgacaatgcgtctaggatcctacggtcattcagc

SEQ ID NO: 750 - DNA, 158 bp, synthetic construct
  misc_feature 1..158: note = Synthetic nucleic acid
  source 1..158: mol_type = other DNA
cagacgacggccagtgtcgacatgagccagaaattaaaagtcgtcactattggtggcgggaaacacttcttgcggcgatggttcctggctcttcgatcctttgccgactgcatcgcagagcttaaaaaagcacatgtaggatcctacggtcattcagc

SEQ ID NO: 751 - DNA, 158 bp, synthetic construct
  misc_feature 1..158: note = Synthetic nucleic acid
  source 1..158: mol_type = other DNA
cagacgacggccagtgtcgacatgaggcgattgcgcttctcgccacgaagttcatttgcccgtaaacacttcttgcggcgatggttcctggctcttcgatcggtaacgcgggcgcagggcacgacaaaagaaggggagggatcctacggtcattcagc

SEQ ID NO: 752 - DNA, 158 bp, synthetic construct
  misc_feature 1..158: note = Synthetic nucleic acid
  source 1..158: mol_type = other DNA
cagacgacggccagtgtcgacatgagtctgctgcaattcagtggcctgtttgttgtctggctaacacttcttgcggcgatggttcctggctcttcgatccgtacaaaatcatcgctccggacgcaggttgaaggagcgggatcctacggtcattcagc

SEQ ID NO: 753 - DNA, 158 bp, synthetic construct
  misc_feature 1..158: note = Synthetic nucleic acid
  source 1..158: mol_type = other DNA
cagacgacggccagtgtcgacatgagttctttaagtcaggctgcgagcagtgtggaaaaacgcaaacacttcttgcggcgatggttcctggctcttcgatccaagcgtatcgagttgaaacctgttgcggggcaaactggatcctacggtcattcagc

SEQ ID NO: 754 - DNA, 158 bp, synthetic construct
  misc_feature 1..158: note = Synthetic nucleic acid
  source 1..158: mol_type = other DNA
cagacgacggccagtgtcgacatgctgagttttctctgggatttggcttcgttcatcgttaacacttcttgcggcgatggttcctggctcttcgatctaatggggcttgcacttttcaatgatttctctcggttactgggatcctacggtcattcagc

SEQ ID NO: 755 - DNA, 158 bp, synthetic construct
  misc_feature 1..158: note = Synthetic nucleic acid
  source 1..158: mol_type = other DNA
cagacgacggccagtgtcgacatggcacttgcaatgaaagtaatctctcaagttgaagcgcagcgaacacttcttgcggcgatggttcctggctcttcgatcgtgctgttgccggagatgaaaatcgccggacagggtggatcctacggtcattcagc

SEQ ID NO: 756 - DNA, 158 bp, synthetic construct
  misc_feature 1..158: note = Synthetic nucleic acid
  source 1..158: mol_type = other DNA
cagacgacggccagtgtcgacatgttgaaatcccccctgttctggaaaatgactagcctgtttaacacttcttgcggcgatggttcctggctcttcgatcaagttacaacggacgatgagttacgtatctggaaaacgggatcctacggtcattcagc

SEQ ID NO: 757 - DNA, 158 bp, synthetic construct
  misc_feature 1..158: note = Synthetic nucleic acid
  source 1..158: mol_type = other DNA
cagacgacggccagtgtcgacgtgtttattggttttgattacggtacagcaaactgttcagtggcggtcataacacttcttgcggcgatggttcctggctcttcgatcgcacgctgggcggaagtggtgtttcgtggaggatcctacggtcattcagc

SEQ ID NO: 758 - DNA, 158 bp, synthetic construct
  misc_feature 1..158: note = Synthetic nucleic acid
  source 1..158: mol_type = other DNA
cagacgacggccagtgtcgacatgaaatttacccaacgtcttagtctgcgcgtcaggctgacgaacacttcttgcggcgatggttcctggctcttcgatccggaacaaggtggatttgaggcgaaggtaagctggaatggatcctacggtcattcagc

SEQ ID NO: 759 - DNA, 158 bp, synthetic construct
  misc_feature 1..158: note = Synthetic nucleic acid
  source 1..158: mol_type = other DNA
cagacgacggccagtgtcgacatgccactaattatcgttgtggcagggattgctttactcctaacacttcttgcggcgatggttcctggctcttcgatcgggctgatttttattctgctcgccagcttagttttaaaaggatcctacggtcattcagc

SEQ ID NO: 760 - DNA, 158 bp, synthetic construct
  misc_feature 1..158: note = Synthetic nucleic acid
  source 1..158: mol_type = other DNA
cagacgacggccagtgtcgacatgctggataaaattgttattgccaaccgcggcgaaacacttcttgcggcgatggttcctggctcttcgatcaacatccactatctggagaaaaaactcggtcttcaggaaaaaggaggatcctacggtcattcagc

SEQ ID NO: 761 - DNA, 158 bp, synthetic construct
  misc_feature 1..158: note = Synthetic nucleic acid
  source 1..158: mol_type = other DNA
cagacgacggccagtgtcgacatgtctacgccatcagcgcgtaccggcggttcactcgacgaacacttcttgcggcgatggttcctggctcttcgatcggcgctggtgaccttctatgcgggtggctgggctatcaggggatcctacggtcattcagc

SEQ ID NO: 762 - DNA, 158 bp, synthetic construct
  misc_feature 1..158: note = Synthetic nucleic acid
  source 1..158: mol_type = other DNA
cagacgacggccagtgtcgacatgtctgaaattgttgtctccaaatttggcggtaccagcaacacttcttgcggcgatggttcctggctcttcgatcagcaggtggtgcaaaaactgcatagtaatttgtttgagagtggatcctacggtcattcagc

SEQ ID NO: 763 - DNA, 158 bp, synthetic construct
  misc_feature 1..158: note = Synthetic nucleic acid
  source 1..158: mol_type = other DNA
cagacgacggccagtgtcgacatgaacgcctgggaagtcaatttcgacgggctggtagggctaacacttcttgcggcgatggttcctggctcttcgatcgtttatccgttccagcgcgagggagggggcaatggacctggatcctacggtcattcagc

SEQ ID NO: 764 - DNA, 158 bp, synthetic construct
  misc_feature 1..158: note = Synthetic nucleic acid
  source 1..158: mol_type = other DNA
cagacgacggccagtgtcgacatgacgacgattctcaagcatctcccggtaggtcaacgtattgaacacttcttgcggcgatggttcctggctcttcgatcgccgcaggtggagaatctggaaaacaaaggccagccaggatcctacggtcattcagc

SEQ ID NO: 765 - DNA, 158 bp, synthetic construct
  misc_feature 1..158: note = Synthetic nucleic acid
  source 1..158: mol_type = other DNA
cagacgacggccagtgtcgacatgcatgtgcttaacattctctgggtggtattcggcattaacacttcttgcggcgatggttcctggctcttcgatcttgggctgattattgtgctgattattagcatggtagcgtccggatcctacggtcattcagc

SEQ ID NO: 766 - DNA, 158 bp, synthetic construct
  misc_feature 1..158: note = Synthetic nucleic acid
  source 1..158: mol_type = other DNA
cagacgacggccagtgtcgacatggatcagacatattctctggagtcattcctcaaccatgtccaaaagcgaacacttcttgcggcgatggttcctggctcttcgatcgatgcgatgctggcgcagggtgtgattgacggatcctacggtcattcagc

SEQ ID NO: 767 - DNA, 158 bp, synthetic construct
  misc_feature 1..158: note = Synthetic nucleic acid
  source 1..158: mol_type = other DNA
cagacgacggccagtgtcgacatggcgaacagcatcacggcggatgagattcgggaacaaacacttcttgcggcgatggttcctggctcttcgatcgaagcggaagaacgcagtaaacgtcgctgtggtttgcttttgggatcctacggtcattcagc

SEQ ID NO: 768 - DNA, 158 bp, synthetic construct
  misc_feature 1..158: note = Synthetic nucleic acid
  source 1..158: mol_type = other DNA
cagacgacggccagtgtcgacgtgagcaatctgtcgctcgatttttcggataatacttttcaacctaacacttcttgcggcgatggttcctggctcttcgatcaggatcaaaatagccccataaaacgctaccgtcttggatcctacggtcattcagc

SEQ ID NO: 769 - DNA, 158 bp, synthetic construct
  misc_feature 1..158: note = Synthetic nucleic acid
  source 1..158: mol_type = other DNA
cagacgacggccagtgtcgacatgagccagaaaaccctgtttacaaagtctgctctcgcaaacacttcttgcggcgatggttcctggctcttcgatcaagcctggctgttcggtactaactttaactacgcgttctccggatcctacggtcattcagc

SEQ ID NO: 770 - DNA, 158 bp, synthetic construct
  misc_feature 1..158: note = Synthetic nucleic acid
  source 1..158: mol_type = other DNA
cagacgacggccagtgtcgacatgagttctcaatttacgacgcctgttgttactgaaatgcaggttatcccaacacttcttgcggcgatggttcctggctcttcgatcgataacaagcgcccgtgcatggtgcgtctcggatcctacggtcattcagc

SEQ ID NO: 771 - DNA, 158 bp, synthetic construct
  misc_feature 1..158: note = Synthetic nucleic acid
  source 1..158: mol_type = other DNA
cagacgacggccagtgtcgacatgatgattactctgcgcaaacttcctctggcggttgccgtaacacttcttgcggcgatggttcctggctcttcgatcgagtggaccttcggtgcccagatggaaatctggtggaatggatcctacggtcattcagc

SEQ ID NO: 772 - DNA, 158 bp, synthetic construct
  misc_feature 1..158: note = Synthetic nucleic acid
  source 1..158: mol_type = other DNA
cagacgacggccagtgtcgacatggcgacacaatccagtcctgttattactgatatgaaagtcattccgaacacttcttgcggcgatggttcctggctcttcgatcaccgtaaacgtcccgttttcggccgtcatggtggatcctacggtcattcagc

SEQ ID NO: 773 - DNA, 158 bp, synthetic construct
  misc_feature 1..158: note = Synthetic nucleic acid
  source 1..158: mol_type = other DNA
cagacgacggccagtgtcgacgtgactacattaacgcttgttttaacagcagtagggtctgttttactgctaacacttcttgcggcgatggttcctggctcttcgatcgggatgattgcgttccagctgttgagtgaaggatcctacggtcattcagc

SEQ ID NO: 774 - DNA, 158 bp, synthetic construct
  misc_feature 1..158: note = Synthetic nucleic acid
  source 1..158: mol_type = other DNA
cagacgacggccagtgtcgacatgaaaaacattatccgtactcccgaaacgcatccgctgacctggaacacttcttgcggcgatggttcctggctcttcgatcggattcagccgaacctgctgaaagagcgctggggaggatcctacggtcattcagc

SEQ ID NO: 775 - DNA, 158 bp, synthetic construct
  misc_feature 1..158: note = Synthetic nucleic acid
  source 1..158: mol_type = other DNA
cagacgacggccagtgtcgacatgaacacttcaccggtgcgaatggatgatttaccgcttaaaacacttcttgcggcgatggttcctggctcttcgatcaatgtaggaggtgcgaatgaacattctgttagcgttcctggatcctacggtcattcagc

SEQ ID NO: 776 - DNA, 158 bp, synthetic construct
  misc_feature 1..158: note = Synthetic nucleic acid
  source 1..158: mol_type = other DNA
cagacgacggccagtgtcgacatgagtaatcgtaaatatttcggtaccgatgggattcgtggtcgtgtagaacacttcttgcggcgatggttcctggctcttcgatcccgcatcgccgatgcagtaaaagccgtttctggatcctacggtcattcagc

SEQ ID NO: 777 - DNA, 158 bp, synthetic construct
  misc_feature 1..158: note = Synthetic nucleic acid
  source 1..158: mol_type = other DNA
cagacgacggccagtgtcgacatgagtcatcaacataccacccagacttctggtcagggaacacttcttgcggcgatggttcctggctcttcgatcctgctgtttatcctgaagattgtctttatcgacgctcacttcggatcctacggtcattcagc

SEQ ID NO: 778 - DNA, 158 bp, synthetic construct
  misc_feature 1..158: note = Synthetic nucleic acid
  source 1..158: mol_type = other DNA
cagacgacggccagtgtcgacatgatgtatcgcatcagaaattggttggtagcgacgctgctgctgctaacacttcttgcggcgatggttcctggctcttcgatcgtgacgacgccagatcgcacgctgccaaactgcggatcctacggtcattcagc

SEQ ID NO: 779 - DNA, 158 bp, synthetic construct
  misc_feature 1..158: note = Synthetic nucleic acid
  source 1..158: mol_type = other DNA
cagacgacggccagtgtcgacatgcactctcaaatctgggttgtgagcacgctgcttatcagaacacttcttgcggcgatggttcctggctcttcgatcgctctggcgggcacattcctgctgtcatttatcatcggaggatcctacggtcattcagc

SEQ ID NO: 780 - DNA, 158 bp, synthetic construct
  misc_feature 1..158: note = Synthetic nucleic acid
  source 1..158: mol_type = other DNA
cagacgacggccagtgtcgacatgggaagccaggaactccaacgcaagctcggattttgggccgttaacacttcttgcggcgatggttcctggctcttcgatccgaagcgtagccgccagctcaacgctttgtcggagggatcctacggtcattcagc

SEQ ID NO: 781 - DNA, 158 bp, synthetic construct
  misc_feature 1..158: note = Synthetic nucleic acid
  source 1..158: mol_type = other DNA
cagacgacggccagtgtcgacatgtcttcggatgctgatgctcacaaagtgggcttaataacacttcttgcggcgatggttcctggctcttcgatcaaaaacccgtatcccttagatgcaccaataagcaaagataccggatcctacggtcattcagc

SEQ ID NO: 782 - DNA, 158 bp, synthetic construct
  misc_feature 1..158: note = Synthetic nucleic acid
  source 1..158: mol_type = other DNA
cagacgacggccagtgtcgacatgactgtaacgactttttccgaacttgaactcgacgaaagcctgctgaacacttcttgcggcgatggttcctggctcttcgatccgggcgtgccaccgcaaacgacagaagagcgaggatcctacggtcattcagc

SEQ ID NO: 783 - DNA, 158 bp, synthetic construct
  misc_feature 1..158: note = Synthetic nucleic acid
  source 1..158: mol_type = other DNA
cagacgacggccagtgtcgacatgagccataaacctgcgcatttattattggtcgatgacgatccaacacttcttgcggcgatggttcctggctcttcgatccgacacgagctggatgcaaacgatttcaaggaacaaggatcctacggtcattcagc

SEQ ID NO: 784 - DNA, 158 bp, synthetic construct
  misc_feature 1..158: note = Synthetic nucleic acid
  source 1..158: mol_type = other DNA
cagacgacggccagtgtcgacatgagttctgccaagaagatcgggctatttgcctgtaccgaacacttcttgcggcgatggttcctggctcttcgatcccactcaatggataaccacaccgcgtctaacgcacattttggatcctacggtcattcagc

SEQ ID NO: 785 - DNA, 158 bp, synthetic construct
  misc_feature 1..158: note = Synthetic nucleic acid
  source 1..158: mol_type = other DNA
cagacgacggccagtgtcgacatgattctggacaccgttgacgaaaaaaagaaaggcgtgaacacttcttgcggcgatggttcctggctcttcgatctcgtagttggcgacattaaacgtatggaattgcagaaatttggatcctacggtcattcagc

SEQ ID NO: 786 - DNA, 158 bp, synthetic construct
  misc_feature 1..158: note = Synthetic nucleic acid
  source 1..158: mol_type = other DNA
cagacgacggccagtgtcgacatgagcgagctgactgatcttttactgcaagggccgcgttctaacacttcttgcggcgatggttcctggctcttcgatcggcaaatcgaagagaaagttgcccgcatgggcgggtgtggatcctacggtcattcagc

SEQ ID NO: 787 - DNA, 158 bp, synthetic construct
  misc_feature 1..158: note = Synthetic nucleic acid
  source 1..158: mol_type = other DNA
cagacgacggccagtgtcgacatgagtacttcagatagcattgtatccagccagacaaaacaatcgtcaacacttcttgcggcgatggttcctggctcttcgatcaccatcctgaacatcgtatacaaactgtttgatggatcctacggtcattcagc

SEQ ID NO: 788 - DNA, 158 bp, synthetic construct
  misc_feature 1..158: note = Synthetic nucleic acid
  source 1..158: mol_type = other DNA
cagacgacggccagtgtcgacatgcaaccgtccagaaactttgacgatctcaaattctcctctattcaaacacttcttgcggcgatggttcctggctcttcgatcaatatgacgatccgcgggcagagaatggggggtggatcctacggtcattcagc

SEQ ID NO: 789 - DNA, 158 bp, synthetic construct
  misc_feature 1..158: note = Synthetic nucleic acid
  source 1..158: mol_type = other DNA
cagacgacggccagtgtcgacatggaaattgcatcgaataaaggcgtcattgcagacgcttaacacttcttgcggcgatggttcctggctcttcgatctttgttgctgtgtgtttctccgttcctggcattttcttggggatcctacggtcattcagc

SEQ ID NO: 790 - DNA, 158 bp, synthetic construct
  misc_feature 1..158: note = Synthetic nucleic acid
  source 1..158: mol_type = other DNA
cagacgacggccagtgtcgacatggaatcactggcctcgctctataaaaatcatatagctaccttacaagaacaacacttcttgcggcgatggttcctggctcttcgatccatgacccgggatctgaaactggcggaaggatcctacggtcattcagc

SEQ ID NO: 791 - DNA, 158 bp, synthetic construct
  misc_feature 1..158: note = Synthetic nucleic acid
  source 1..158: mol_type = other DNA
cagacgacggccagtgtcgacatggctaaacaaccgggattagattttcaaagtgccaaaggtggcttaaacacttcttgcggcgatggttcctggctcttcgatcagaaggcgaacctgaaaggctacggccgatcgggatcctacggtcattcagc

SEQ ID NO: 792 - DNA, 158 bp, synthetic construct
  misc_feature 1..158: note = Synthetic nucleic acid
  source 1..158: mol_type = other DNA
cagacgacggccagtgtcgacatgtctgaaatgaccccacgcgaaatcgtcagcgaaaacacttcttgcggcgatggttcctggctcttcgatcatgcgttggtggcagatgaagatctgagccgttttatcctaatgggatcctacggtcattcagc

SEQ ID NO: 793 - DNA, 158 bp, synthetic construct
  misc_feature 1..158: note = Synthetic nucleic acid
  source 1..158: mol_type = other DNA
cagacgacggccagtgtcgacgtggtaaaggaacgtaaaaccgagttggtcgagggattccaacacttcttgcggcgatggttcctggctcttcgatcccagcgtaaatccaaagtgttgatggcggatttagggaatggatcctacggtcattcagc

SEQ ID NO: 794 - DNA, 158 bp, synthetic construct
  misc_feature 1..158: note = Synthetic nucleic acid
  source 1..158: mol_type = other DNA
cagacgacggccagtgtcgacatgcacattggacaggctcttgatctggtatcccgttacgattctaacacttcttgcggcgatggttcctggctcttcgatcccacagccccgaaaaagagccagtcagttgctcgtggatcctacggtcattcagc

SEQ ID NO: 795 - DNA, 158 bp, synthetic construct
  misc_feature 1..158: note = Synthetic nucleic acid
  source 1..158: mol_type = other DNA
cagacgacggccagtgtcgacatggaaaacgctaaaatgaactcgctcatcgcccagtataacacttcttgcggcgatggttcctggctcttcgatccggaagaagagatgaatcaatatctggcaaaaggccgtccaggatcctacggtcattcagc

SEQ ID NO: 796 - DNA, 158 bp, synthetic construct
  misc_feature 1..158: note = Synthetic nucleic acid
  source 1..158: mol_type = other DNA
cagacgacggccagtgtcgacatggcaatgttcggttttcctcactggcagttaaaatcgacctctaaacacttcttgcggcgatggttcctggctcttcgatctccaccgccagaagttgttcatcaggagccacttggatcctacggtcattcagc

SEQ ID NO: 797 - DNA, 158 bp, synthetic construct
  misc_feature 1..158: note = Synthetic nucleic acid
  source 1..158: mol_type = other DNA
cagacgacggccagtgtcgacatgttgattctgaagaatgtcactgcggtacagctacacccggcaaaaaacacttcttgcggcgatggttcctggctcttcgatcgtatgtggcgtcggatggatgcgctggcagatggatcctacggtcattcagc

SEQ ID NO: 798 - DNA, 158 bp, synthetic construct
  misc_feature 1..158: note = Synthetic nucleic acid
  source 1..158: mol_type = other DNA
cagacgacggccagtgtcgacatgacgcacgataatatcgatattctggtggtggatgatgacattagcaacacttcttgcggcgatggttcctggctcttcgatcgcaaaacgctattggcaaaactgtcgcgtttgggatcctacggtcattcagc

SEQ ID NO: 799 - DNA, 158 bp, synthetic construct
  misc_feature 1..158: note = Synthetic nucleic acid
  source 1..158: mol_type = other DNA
cagacgacggccagtgtcgacatgagcaaagtaactccccagccgaaaatcggctttgtttcccttaacacttcttgcggcgatggttcctggctcttcgatcccgatgagtacgatttgtggggtagccgggttactggatcctacggtcattcagc

SEQ ID NO: 800 - DNA, 158 bp, synthetic construct
  misc_feature 1..158: note = Synthetic nucleic acid
  source 1..158: mol_type = other DNA
cagacgacggccagtgtcgacatgagtgagatatcccggcaagagtttcagcgtcgccaacacttcttgcggcgatggttcctggctcttcgatcggaagaaatcgaagcgttgatggttgctgcgagaaagcaaccaggatcctacggtcattcagc

SEQ ID NO: 801 - DNA, 158 bp, synthetic construct
  misc_feature 1..158: note = Synthetic nucleic acid
  source 1..158: mol_type = other DNA
cagacgacggccagtgtcgacatgagtgaattttcccagacagtccccgaactggttgcctaacacttcttgcggcgatggttcctggctcttcgatccggagccaaggtacaggcgcatgtcatcgacaaatatctcggatcctacggtcattcagc

SEQ ID NO: 802 - DNA, 158 bp, synthetic construct
  misc_feature 1..158: note = Synthetic nucleic acid
  source 1..158: mol_type = other DNA
cagacgacggccagtgtcgacatgattggtcgcatatcgcgttttatgacgcgttttgtaacacttcttgcggcgatggttcctggctcttcgatcttctccggtgtcattttcgtcattggtttaacgctgttcgcaggatcctacggtcattcagc

SEQ ID NO: 803 - DNA, 158 bp, synthetic construct
  misc_feature 1..158: note = Synthetic nucleic acid
  source 1..158: mol_type = other DNA
cagacgacggccagtgtcgacatgcaagcaacagccacaacactcgaccacgagcaagaatacaaacacttcttgcggcgatggttcctggctcttcgatcgctgctgacccatgagacgcgacatcagtcgttgcatggatcctacggtcattcagc

SEQ ID NO: 804 - DNA, 158 bp, synthetic construct
  misc_feature 1..158: note = Synthetic nucleic acid
  source 1..158: mol_type = other DNA
cagacgacggccagtgtcgacatgcaagcctattttgaccagctcgatcgcgttaacacttcttgcggcgatggttcctggctcttcgatcaggaacaactggaaaatctggtaaaccattatctgttcgacaaaaaaggatcctacggtcattcagc

SEQ ID NO: 805 - DNA, 158 bp, synthetic construct
  misc_feature 1..158: note = Synthetic nucleic acid
  source 1..158: mol_type = other DNA
cagacgacggccagtgtcgacatgcctaaacttgtcacttggatgaacaaccagcgggtaaacacttcttgcggcgatggttcctggctcttcgatcggttgcatggacggttaagccgagaatacggtagtaaggccggatcctacggtcattcagc

SEQ ID NO: 806 - DNA, 158 bp, synthetic construct
  misc_feature 1..158: note = Synthetic nucleic acid
  source 1..158: mol_type = other DNA
cagacgacggccagtgtcgacgtgcaacagatagcccgctctgtcgccctggcgtttaataatttaaacacttcttgcggcgatggttcctggctcttcgatcccaaagagattgtgccgcagctacggtttgattctggatcctacggtcattcagc

SEQ ID NO: 807 - DNA, 158 bp, synthetic construct
  misc_feature 1..158: note = Synthetic nucleic acid
  source 1..158: mol_type = other DNA
cagacgacggccagtgtcgacttgtttctcgcacaagaaattattcgtaaaaaacgtgatggtcatgcgaacacttcttgcggcgatggttcctggctcttcgatccaccaactgtctatcgccgtatcagcgaacaaggatcctacggtcattcagc

SEQ ID NO: 808 - DNA, 158 bp, synthetic construct
  misc_feature 1..158: note = Synthetic nucleic acid
  source 1..158: mol_type = other DNA
cagacgacggccagtgtcgacatgacccatcaattaagatcgcgcgatatcatcgctctgggctttatgaaacacttcttgcggcgatggttcctggctcttcgatcaggtcgtcaggtgacctccagcgctcactctggatcctacggtcattcagc

SEQ ID NO: 809 - DNA, 158 bp, synthetic construct
  misc_feature 1..158: note = Synthetic nucleic acid
  source 1..158: mol_type = other DNA
cagacgacggccagtgtcgacatgagtcaggctaaatcgaacaaaatgggcgtcgttcaaacacttcttgcggcgatggttcctggctcttcgatcctggtatcaccacgctttgaactgaaaaataaacacggttcaggatcctacggtcattcagc

SEQ ID NO: 810 - DNA, 158 bp, synthetic construct
  misc_feature 1..158: note = Synthetic nucleic acid
  source 1..158: mol_type = other DNA
cagacgacggccagtgtcgacatgatgtcaggagaacacacgttaaaagcggtacgaggcagttttattaacacttcttgcggcgatggttcctggctcttcgatcttgatggtcgtctggtgtacgaacgcaacagaggatcctacggtcattcagc

SEQ ID NO: 811 - DNA, 158 bp, synthetic construct
  misc_feature 1..158: note = Synthetic nucleic acid
  source 1..158: mol_type = other DNA
cagacgacggccagtgtcgacatgccattaatcattattgcggcaggcgtcgcgctgcttaacacttcttgcggcgatggttcctggctcttcgatcgtttgctgggcgtgttagccattaacgccgtattgcaccagggatcctacggtcattcagc

SEQ ID NO: 812 - DNA, 158 bp, synthetic construct
  misc_feature 1..158: note = Synthetic nucleic acid
  source 1..158: mol_type = other DNA
cagacgacggccagtgtcgacatggatatctgctcccgaaacaagaaattaacgattagaagaccagcgataaacacttcttgcggcgatggttcctggctcttcgatcgctatctgcaaagtcgctggggcagtttcggatcctacggtcattcagc

SEQ ID NO: 813 - DNA, 158 bp, synthetic construct
  misc_feature 1..158: note = Synthetic nucleic acid
  source 1..158: mol_type = other DNA
cagacgacggccagtgtcgacatgttgccgtttctgaaagcgcctgccgatgcgccattaatgactaacacttcttgcggcgatggttcctggctcttcgatccctttttgaacgcccagacaccgcgcgaagcgcgaggatcctacggtcattcagc

SEQ ID NO: 814 - DNA, 158 bp, synthetic construct
  misc_feature 1..158: note = Synthetic nucleic acid
  source 1..158: mol_type = other DNA
cagacgacggccagtgtcgacatgaaaccgttacattatacagcttcagcactggcgctcggaaacacttcttgcggcgatggttcctggctcttcgatcagttgctgcgccgctttgagaaatcgacgaagtctattggatcctacggtcattcagc

SEQ ID NO: 815 - DNA, 158 bp, synthetic construct
  misc_feature 1..158: note = Synthetic nucleic acid
  source 1..158: mol_type = other DNA
cagacgacggccagtgtcgacatgccattagtcattgttgctatcggtgtaatcttgttgttgctaacacttcttgcggcgatggttcctggctcttcgatcctggtaggctgtctgctgctgaatatggtgattagtggatcctacggtcattcagc

SEQ ID NO: 816 - DNA, 158 bp, synthetic construct
  misc_feature 1..158: note = Synthetic nucleic acid
  source 1..158: mol_type = other DNA
cagacgacggccagtgtcgacatggactccacgctcatctccactcgtcccgatgaaggaacacttcttgcggcgatggttcctggctcttcgatcgcaatgaccgctttgttgatgaaagacagtcaacgcgctagtggatcctacggtcattcagc

SEQ ID NO: 817 - DNA, 158 bp, synthetic construct
  misc_feature 1..158: note = Synthetic nucleic acid
  source 1..158: mol_type = other DNA
cagacgacggccagtgtcgacatggctgattatcagggtaaaaatgtcgtcattatcggcctgggaacacttcttgcggcgatggttcctggctcttcgatcaatgagtttgcccgtctggcgaaggagttaggtgaaggatcctacggtcattcagc

SEQ ID NO: 818 - DNA, 158 bp, synthetic construct
  misc_feature 1..158: note = Synthetic nucleic acid
  source 1..158: mol_type = other DNA
cagacgacggccagtgtcgacatgggaaacacatcaatacaaacgcagagttaccgtgcgaacacttcttgcggcgatggttcctggctcttcgatcttatctttgcccgtttccgttctcaaacggcaactaacaagggatcctacggtcattcagc

SEQ ID NO: 819 - DNA, 158 bp, synthetic construct
  misc_feature 1..158: note = Synthetic nucleic acid
  source 1..158: mol_type = other DNA
cagacgacggccagtgtcgacatgaaaaatataaaattcagcctggcctggcagattctgtttgctatgaacacttcttgcggcgatggttcctggctcttcgatctgggcaaatttgataaaactgcggatcaagtgggatcctacggtcattcagc

SEQ ID NO: 820 - DNA, 158 bp, synthetic construct
  misc_feature 1..158: note = Synthetic nucleic acid
  source 1..158: mol_type = other DNA
cagacgacggccagtgtcgacatgataaccaatacaaagcttgacccgattgaaaccgcgtctgttaacacttcttgcggcgatggttcctggctcttcgatcgggtgtttgatctgcgcaatattgttggtgccattggatcctacggtcattcagc

SEQ ID NO: 821 - DNA, 158 bp, synthetic construct
  misc_feature 1..158: note = Synthetic nucleic acid
  source 1..158: mol_type = other DNA
cagacgacggccagtgtcgacatgtttgattacatcctgtctctcggcggtaccgttttcaacacttcttgcggcgatggttcctggctcttcgatcgcgtcgtgctgttcttacgtaaacgtgaattatcggaatacggatcctacggtcattcagc

SEQ ID NO: 822 - DNA, 158 bp, synthetic construct
  misc_feature 1..158: note = Synthetic nucleic acid
  source 1..158: mol_type = other DNA
cagacgacggccagtgtcgacatggagtctttgaatcaatttgttaattcgcttgccccaaaattatcgcaaacacttcttgcggcgatggttcctggctcttcgatcctcaattttccctggacgcgaggtatcttgggatcctacggtcattcagc

SEQ ID NO: 823 - DNA, 158 bp, synthetic construct
  misc_feature 1..158: note = Synthetic nucleic acid
  source 1..158: mol_type = other DNA
cagacgacggccagtgtcgacatgggtcaggttttaccgctggttacccgccagggcgatcgtatcaacacttcttgcggcgatggttcctggctcttcgatcggcttggcgcggcaatggttctggaggcggaacgaggatcctacggtcattcagc

SEQ ID NO: 824 - DNA, 158 bp, synthetic construct
  misc_feature 1..158: note = Synthetic nucleic acid
  source 1..158: mol_type = other DNA
cagacgacggccagtgtcgacatgtttgattcgactttaaatccgttatggcagcgttacatcctcaacacttcttgcggcgatggttcctggctcttcgatcagattatcgagattatggcgagcaaggccagatgtggatcctacggtcattcagc

SEQ ID NO: 825 - DNA, 158 bp, synthetic construct
  misc_feature 1..158: note = Synthetic nucleic acid
  source 1..158: mol_type = other DNA
cagacgacggccagtgtcgacatgaaacgtgtttctcaaatgaccgcgctggcaatggctttagggctaacacttcttgcggcgatggttcctggctcttcgatcaccggtgaacgcggcccggacagtagcaaacgtggatcctacggtcattcagc

SEQ ID NO: 826 - DNA, 158 bp, synthetic construct
  misc_feature 1..158: note = Synthetic nucleic acid
  source 1..158: mol_type = other DNA
cagacgacggccagtgtcgacatgaaaacccgtacacaacaaattgaagaattacagaaagagtggactcaaaacacttcttgcggcgatggttcctggctcttcgatcccggctccactgaagaatcgcagttcgtcggatcctacggtcattcagc

SEQ ID NO: 827 - DNA, 158 bp, synthetic construct
  misc_feature 1..158: note = Synthetic nucleic acid
  source 1..158: mol_type = other DNA
cagacgacggccagtgtcgacatgaaacggacaatgctctatctttctctgctggctgttagttaacacttcttgcggcgatggttcctggctcttcgatcagttgatcaggtgtatgcggcgttaaagcagaagagaggatcctacggtcattcagc

SEQ ID NO: 828 - DNA, 158 bp, synthetic construct
  misc_feature 1..158: note = Synthetic nucleic acid
  source 1..158: mol_type = other DNA
cagacgacggccagtgtcgacatgaaatttcccggtaaacgtaaatccaaacattacttccccgtaaacgaacacttcttgcggcgatggttcctggctcttcgatccagcctggaagagtcttactgggatcgtggtggatcctacggtcattcagc

SEQ ID NO: 829 - DNA, 158 bp, synthetic construct
  misc_feature 1..158: note = Synthetic nucleic acid
  source 1..158: mol_type = other DNA
cagacgacggccagtgtcgacatgagctttaacacaatcattgactggaatagctgtactgcggagaacacttcttgcggcgatggttcctggctcttcgatcctttgcgtgttaacgcccttaaggagcaagcagccggatcctacggtcattcagc

SEQ ID NO: 830 - DNA, 158 bp, synthetic construct
  misc_feature 1..158: note = Synthetic nucleic acid
  source 1..158: mol_type = other DNA
cagacgacggccagtgtcgacatggatctgtatattcagattatcgtggtggcgtgcctgacggaacacttcttgcggcgatggttcctggctcttcgatctgttctttactggcttggcctgttcgttccggctaatggatcctacggtcattcagc

SEQ ID NO: 831 - DNA, 158 bp, synthetic construct
  misc_feature 1..158: note = Synthetic nucleic acid
  source 1..158: mol_type = other DNA
cagacgacggccagtgtcgacttgactacgccattgaaaaagattgtgattgtcggcggcaacacttcttgcggcgatggttcctggctcttcgatcgtattaaccgcgttatccgtccgcgtttgaagttgcataacggatcctacggtcattcagc

SEQ ID NO: 832 - DNA, 158 bp, synthetic construct
  misc_feature 1..158: note = Synthetic nucleic acid
  source 1..158: mol_type = other DNA
cagacgacggccagtgtcgacatgctagttgtagaactcatcatagttttgctggcgatcttcttgggaacacttcttgcggcgatggttcctggctcttcgatcttcggcttcgtgctgggtagcttcatgctgataggatcctacggtcattcagc

SEQ ID NO: 833 - DNA, 158 bp, synthetic construct
  misc_feature 1..158: note = Synthetic nucleic acid
  source 1..158: mol_type = other DNA
cagacgacggccagtgtcgacatggcgcaattctactctgcaaaacgacgcacgacgaaacacttcttgcggcgatggttcctggctcttcgatcgggacatctggaatcgatggtacttttctcgcgcgttaaatggggatcctacggtcattcagc

SEQ ID NO: 834 - DNA, 158 bp, synthetic construct
  misc_feature 1..158: note = Synthetic nucleic acid
  source 1..158: mol_type = other DNA
cagacgacggccagtgtcgacatggctcaggaaatcgaattaaagtttattgttaatcacagtgccgttgaaacacttcttgcggcgatggttcctggctcttcgatcccgttctggttgcacagcggaaaacgtacgggatcctacggtcattcagc

SEQ ID NO: 835 - DNA, 158 bp, synthetic construct
  misc_feature 1..158: note = Synthetic nucleic acid
  source 1..158: mol_type = other DNA
cagacgacggccagtgtcgacatgttcaattttgcagtcagccgcgaaagcctgttataacacttcttgcggcgatggttcctggctcttcgatctgttcttatggataaccttattccgtgggaacgcatcgaagccggatcctacggtcattcagc

SEQ ID NO: 836 - DNA, 158 bp, synthetic construct
  misc_feature 1..158: note = Synthetic nucleic acid
  source 1..158: mol_type = other DNA
cagacgacggccagtgtcgacatgaaagcgatcttaatcccatttttatctcttctgattccgttaaccccgaacacttcttgcggcgatggttcctggctcttcgatcaagcacgcataccggcgtgcagtttggtaggatcctacggtcattcagc

SEQ ID NO: 837 - DNA, 158 bp, synthetic construct
  misc_feature 1..158: note = Synthetic nucleic acid
  source 1..158: mol_type = other DNA
cagacgacggccagtgtcgacatgacactcacgctcaatagacaacttctcacctcacgaacacttcttgcggcgatggttcctggctcttcgatcgagaatggcgtaagttttgtctggcagaaaacgcttagtatcggatcctacggtcattcagc

SEQ ID NO: 838 - DNA, 158 bp, synthetic construct
  misc_feature 1..158: note = Synthetic nucleic acid
  source 1..158: mol_type = other DNA
cagacgacggccagtgtcgacatgcaagtttcagttgaaaccactcaaggccttggccgaacacttcttgcggcgatggttcctggctcttcgatcaaagaaaccactttcaacgagctgatgaaccagcaggcgcaaggatcctacggtcattcagc

SEQ ID NO: 839 - DNA, 158 bp, synthetic construct
  misc_feature 1..158: note = Synthetic nucleic acid
  source 1..158: mol_type = other DNA
cagacgacggccagtgtcgacatgcgagttgtcatactgggaagtggtgtggtaggcgttgccaaacacttcttgcggcgatggttcctggctcttcgatcatcacgtccgggccatttacatggcgcacacagccaaggatcctacggtcattcagc

SEQ ID NO: 840 - DNA, 158 bp, synthetic construct
  misc_feature 1..158: note = Synthetic nucleic acid
  source 1..158: mol_type = other DNA
cagacgacggccagtgtcgacatggctgaaagtactgtaacggcagacagcaaactgacaagtaaacacttcttgcggcgatggttcctggctcttcgatcgatgctacatcgcaaagggaaggggatgcgtcttcatggatcctacggtcattcagc

SEQ ID NO: 841 - DNA, 158 bp, synthetic construct
  misc_feature 1..158: note = Synthetic nucleic acid
  source 1..158: mol_type = other DNA
cagacgacggccagtgtcgacatgggtaacaacgtcgtcgtactgggcacccaatggggtaacacttcttgcggcgatggttcctggctcttcgatcgtactgaaaccatgattctgcgcgacccgttcgacgcgtgcggatcctacggtcattcagc

SEQ ID NO: 842 - DNA, 158 bp, synthetic construct
  misc_feature 1..158: note = Synthetic nucleic acid
  source 1..158: mol_type = other DNA
cagacgacggccagtgtcgacatgtccaaaatcgtaaaaatcatcggtcgtgaaatcatcgactccaacacttcttgcggcgatggttcctggctcttcgatcacaacggtcgtaaagagatcaaaggccaggcactgggatcctacggtcattcagc

SEQ ID NO: 843 - DNA, 158 bp, synthetic construct
  misc_feature 1..158: note = Synthetic nucleic acid
  source 1..158: mol_type = other DNA
cagacgacggccagtgtcgacatggttagtttagagaagaacgatcacttaatgttggcgcgcaacacttcttgcggcgatggttcctggctcttcgatcaaatgctacggaagttagggcataaacaggagcgagcaggatcctacggtcattcagc

SEQ ID NO: 844 - DNA, 158 bp, synthetic construct
  misc_feature 1..158: note = Synthetic nucleic acid
  source 1..158: mol_type = other DNA
cagacgacggccagtgtcgacgtgcaatcacttactacggcgctggaaaatctactgcgaacacttcttgcggcgatggttcctggctcttcgatcaacaaagcggcagggctgcgtactttattacaaatggaacacggatcctacggtcattcagc

SEQ ID NO: 845 - DNA, 158 bp, synthetic construct
  misc_feature 1..158: note = Synthetic nucleic acid
  source 1..158: mol_type = other DNA
cagacgacggccagtgtcgacgtgctggaacggctgtcgtggaaaaggctggtaacacttcttgcggcgatggttcctggctcttcgatcttcagttttgttatcccggaacgtttaattgccaaaaacagcgatttgggatcctacggtcattcagc

SEQ ID NO: 846 - DNA, 158 bp, synthetic construct
  misc_feature 1..158: note = Synthetic nucleic acid
  source 1..158: mol_type = other DNA
cagacgacggccagtgtcgacatgaagcaggcattacgagtagcatttggttttctcatactgtgggaacacttcttgcggcgatggttcctggctcttcgatcggtcaaattccctgcctggtcgccgtatctgccaggatcctacggtcattcagc

SEQ ID NO: 847 - DNA, 158 bp, synthetic construct
  misc_feature 1..158: note = Synthetic nucleic acid
  source 1..158: mol_type = other DNA
cagacgacggccagtgtcgacatgatgaacacggaaggtaataacggtaacaaacctctcggtaacacttcttgcggcgatggttcctggctcttcgatcttgtggcaatggtcatgaagcgcaataaaaccgtaagtggatcctacggtcattcagc

SEQ ID NO: 848 - DNA, 158 bp, synthetic construct
  misc_feature 1..158: note = Synthetic nucleic acid
  source 1..158: mol_type = other DNA
cagacgacggccagtgtcgacatgattaaatcaaaaatcgtgctgttatcagcactggtttcatgcgcaacacttcttgcggcgatggttcctggctcttcgatcaaaaaactggatgaactgatcgaacagcactctggatcctacggtcattcagc

SEQ ID NO: 849 - DNA, 158 bp, synthetic construct
  misc_feature 1..158: note = Synthetic nucleic acid
  source 1..158: mol_type = other DNA
cagacgacggccagtgtcgacatgctcgatcccaatctgctgcgtaatgagccaaacacttcttgcggcgatggttcctggctcttcgatccagaagttctgcgtccgtatatgaacggactggaatatattggcaccggatcctacggtcattcagc

SEQ ID NO: 850 - DNA, 158 bp, synthetic construct
  misc_feature 1..158: note = Synthetic nucleic acid
  source 1..158: mol_type = other DNA
cagacgacggccagtgtcgacatggatattcccgttaatgcagcaaagccggggcgtcggaacacttcttgcggcgatggttcctggctcttcgatccttatatcctgctggtgggcgatgtgaagcgcgttggcgaaggatcctacggtcattcagc

SEQ ID NO: 851 - DNA, 158 bp, synthetic construct
  misc_feature 1..158: note = Synthetic nucleic acid
  source 1..158: mol_type = other DNA
cagacgacggccagtgtcgacttgctacaaggcgctggctggttattgttgctggcaacacttcttgcggcgatggttcctggctcttcgatcacagacgagcacaaagcgatgctgagattatgggaaaacaggcccggatcctacggtcattcagc

SEQ ID NO: 852 - DNA, 158 bp, synthetic construct
  misc_feature 1..158: note = Synthetic nucleic acid
  source 1..158: mol_type = other DNA
cagacgacggccagtgtcgacatgaaaaaacaacgtaatttacgtagcatggcggcccaaacacttcttgcggcgatggttcctggctcttcgatcgagggcgacggcttcttttacgctaagctaatcaaaaagttaggatcctacggtcattcagc

SEQ ID NO: 853 - DNA, 158 bp, synthetic construct
  misc_feature 1..158: note = Synthetic nucleic acid
  source 1..158: mol_type = other DNA
cagacgacggccagtgtcgacatgaaagtattagtgattggtaacggcgggcgcgagcacgcgaacacttcttgcggcgatggttcctggctcttcgatcatatcggctggcgcgctatcgaacgcgagcagaaccgaggatcctacggtcattcagc

SEQ ID NO: 854 - DNA, 158 bp, synthetic construct
  misc_feature 1..158: note = Synthetic nucleic acid
  source 1..158: mol_type = other DNA
cagacgacggccagtgtcgacatgacaacggacgatcttgcctttgaccaacgccatataacacttcttgcggcgatggttcctggctcttcgatcgttaaccgcgcggtacaggatgaaacatttttttgccaatggggatcctacggtcattcagc

SEQ ID NO: 855 - DNA, 158 bp, synthetic construct
  misc_feature 1..158: note = Synthetic nucleic acid
  source 1..158: mol_type = other DNA
cagacgacggccagtgtcgacatgacgcgccgtgctatcggggtgagtgaaagaaacacttcttgcggcgatggttcctggctcttcgatcaagaagtggtgctggacgcagaagacgcggatataacagacaaaagaggatcctacggtcattcagc

SEQ ID NO: 856 - DNA, 158 bp, synthetic construct
  misc_feature 1..158: note = Synthetic nucleic acid
  source 1..158: mol_type = other DNA
cagacgacggccagtgtcgacatgagcaccgctttgcttgacgccgtggtgaagaaaaaccgtaacacttcttgcggcgatggttcctggctcttcgatcatcgcactgttgcgcagaccgacgtggcacatcattcaggatcctacggtcattcagc

SEQ ID NO: 857 - DNA, 158 bp, synthetic construct
  misc_feature 1..158: note = Synthetic nucleic acid
  source 1..158: mol_type = other DNA
cagacgacggccagtgtcgacatggaaacgactcaaaccagcacgattgcgtcgaaaaacacttcttgcggcgatggttcctggctcttcgatcgtctgattgcaatctccgcaatcttctactctctgttcagcttcggatcctacggtcattcagc

SEQ ID NO: 858 - DNA, 158 bp, synthetic construct
  misc_feature 1..158: note = Synthetic nucleic acid
  source 1..158: mol_type = other DNA
cagacgacggccagtgtcgacatgtcggatgacaaatttgatgccattgtggtcggtgcggaacacttcttgcggcgatggttcctggctcttcgatccttgctgaaagatggcattaagggagcaaccgcgctaccgggatcctacggtcattcagc

SEQ ID NO: 859 - DNA, 158 bp, synthetic construct
  misc_feature 1..158: note = Synthetic nucleic acid
  source 1..158: mol_type = other DNA
cagacgacggccagtgtcgacatgttactggcaggcgctatctttgtcctgaccatcgtattggttataacacttcttgcggcgatggttcctggctcttcgatcgcgctggcgctacgtctctctttcactttggggggatcctacggtcattcagc

SEQ ID NO: 860 - DNA, 158 bp, synthetic construct
  misc_feature 1..158: note = Synthetic nucleic acid
  source 1..158: mol_type = other DNA
cagacgacggccagtgtcgacatgaaaacctctctgtttaaaagcctttactttcaggtcctgacagcaacacttcttgcggcgatggttcctggctcttcgatcccggatggcaaaacgcacgaattatcctctggcggatcctacggtcattcagc

SEQ ID NO: 861 - DNA, 158 bp, synthetic construct
  misc_feature 1..158: note = Synthetic nucleic acid
  source 1..158: mol_type = other DNA
cagacgacggccagtgtcgacatgaaactctacaatctgaaagatcacaacgagcaggtcagctttaacacttcttgcggcgatggttcctggctcttcgatcctgcgttgcgtaaattgatgatgaatcatcagtacggatcctacggtcattcagc

SEQ ID NO: 862 - DNA, 158 bp, synthetic construct
  misc_feature 1..158: note = Synthetic nucleic acid
  source 1..158: mol_type = other DNA
cagacgacggccagtgtcgacatgaagaactggaaaacgctgcttctcggtatcgccatgataacacttcttgcggcgatggttcctggctcttcgatccaacgtgccagcgcctacgttaaaatcctgagcaactctggatcctacggtcattcagc

SEQ ID NO: 863 - DNA, 158 bp, synthetic construct
  misc_feature 1..158: note = Synthetic nucleic acid
  source 1..158: mol_type = other DNA
cagacgacggccagtgtcgacatgaagatagcgacgataaaaactgggcttgcttcactggcgataacacttcttgcggcgatggttcctggctcttcgatcgtcaacagccacggcgagaatgcctataacgcgcagggatcctacggtcattcagc

SEQ ID NO: 864 - DNA, 158 bp, synthetic construct
  misc_feature 1..158: note = Synthetic nucleic acid
  source 1..158: mol_type = other DNA
cagacgacggccagtgtcgacatggatgaattcaaaccagaagacgagctgaaacccgatcccagaacacttcttgcggcgatggttcctggctcttcgatcaaaccgctgcgtcaggtacaggccgatctgaagcctggatcctacggtcattcagc

SEQ ID NO: 865 - DNA, 158 bp, synthetic construct
  misc_feature 1..158: note = Synthetic nucleic acid
  source 1..158: mol_type = other DNA
cagacgacggccagtgtcgacatgtccgaagatatctttgacgccatcatcgtcggtaacacttcttgcggcgatggttcctggctcttcgatctcaatctaatcaaggatggcatgaaaggagtgaccgttttattcggatcctacggtcattcagc

SEQ ID NO: 866 - DNA, 158 bp, synthetic construct
  misc_feature 1..158: note = Synthetic nucleic acid
  source 1..158: mol_type = other DNA
cagacgacggccagtgtcgacctggaacacatttctactactacgttgatcattattctgatcatcatggtggtcatttaacacttcttgcggcgatggttcctggctcttcgatcgcgcgagagtgtggcggagcaaggatcctacggtcattcagc

SEQ ID NO: 867 - DNA, 158 bp, synthetic construct
  misc_feature 1..158: note = Synthetic nucleic acid
  source 1..158: mol_type = other DNA
cagacgacggccagtgtcgacatgacagaagcgatgaagattaccctctctacccaacctgccaacacttcttgcggcgatggttcctggctcttcgatcttggtgtgcgcacgatagctaatctgttaacggcgaaaggatcctacggtcattcagc

SEQ ID NO: 868 - DNA, 158 bp, synthetic construct
  misc_feature 1..158: note = Synthetic nucleic acid
  source 1..158: mol_type = other DNA
cagacgacggccagtgtcgacatgacctggtttattgaccggcgtctgaacggcaaaaaaacacttcttgcggcgatggttcctggctcttcgatccgtgaactgtttcataaacaaaatgcaacagctaaaggctctggatcctacggtcattcagc

SEQ ID NO: 869 - DNA, 158 bp, synthetic construct
  misc_feature 1..158: note = Synthetic nucleic acid
  source 1..158: mol_type = other DNA
cagacgacggccagtgtcgacatggaatccctgacgttacaacccatcgctcgtgtcgatggcactattaataacacttcttgcggcgatggttcctggctcttcgatcagctggcgcggattagccaggcagccatcggatcctacggtcattcagc

SEQ ID NO: 870 - DNA, 158 bp, synthetic construct
  misc_feature 1..158: note = Synthetic nucleic acid
  source 1..158: mol_type = other DNA
cagacgacggccagtgtcgacatggctcttaacacaccacaaattacgccgacaaaaaagataacagtgaaacacttcttgcggcgatggttcctggctcttcgatctgagtcaggaaacgcccgcttcgacgaccgaggatcctacggtcattcagc

SEQ ID NO: 871 - DNA, 158 bp, synthetic construct
  misc_feature 1..158: note = Synthetic nucleic acid
  source 1..158: mol_type = other DNA
cagacgacggccagtgtcgacatggctgatacaaaagcaaaactcaccctcaacgggaacacttcttgcggcgatggttcctggctcttcgatccaggatatgaaaaacgcgactttaaaagcgatatcaagcgtgagggatcctacggtcattcagc

SEQ ID NO: 872 - DNA, 158 bp, synthetic construct
  misc_feature 1..158: note = Synthetic nucleic acid
  source 1..158: mol_type = other DNA
cagacgacggccagtgtcgacgtgaacacattttcagtttcccgtctggcgctggcattggaacacttcttgcggcgatggttcctggctcttcgatccggcgtgggtagtaaagtggttgcagaggcgaagaaggccggatcctacggtcattcagc

SEQ ID NO: 873 - DNA, 158 bp, synthetic construct
  misc_feature 1..158: note = Synthetic nucleic acid
  source 1..158: mol_type = other DNA
cagacgacggccagtgtcgacgtgtcgaataacgctttacaaacaattattaacgcccggttaccaaacacttcttgcggcgatggttcctggctcttcgatctggagcagccagaagccatcgattacaaacgtggaggatcctacggtcattcagc

SEQ ID NO: 874 - DNA, 158 bp, synthetic construct
  misc_feature 1..158: note = Synthetic nucleic acid
  source 1..158: mol_type = other DNA
cagacgacggccagtgtcgacatgaaattacttattctgggcaaccacacttgcggcaatcgtggcaacacttcttgcggcgatggttcctggctcttcgatcagtctgtgcttgagcgcatcggggaggtgaaaattggatcctacggtcattcagc

SEQ ID NO: 875 - DNA, 158 bp, synthetic construct
  misc_feature 1..158: note = Synthetic nucleic acid
  source 1..158: mol_type = other DNA
cagacgacggccagtgtcgacatgaacagcaataaagagttaatgcagcgccgcagtcaggaacacttcttgcggcgatggttcctggctcttcgatcggagatcatcagccagtgttttgatgaggcgaagcagttaggatcctacggtcattcagc

SEQ ID NO: 876 - DNA, 158 bp, synthetic construct
  misc_feature 1..158: note = Synthetic nucleic acid
  source 1..158: mol_type = other DNA
cagacgacggccagtgtcgacatgaataaactcatcgaactcagacgcgccaaaaggttggcgctctaacacttcttgcggcgatggttcctggctcttcgatcgctcccggccttgttccccctcggcaattttggcggatcctacggtcattcagc

SEQ ID NO: 877 - DNA, 158 bp, synthetic construct
  misc_feature 1..158: note = Synthetic nucleic acid
  source 1..158: mol_type = other DNA
cagacgacggccagtgtcgacatgaccgaacataccagcagttactacgccgccagtgcgaataaatataacacttcttgcggcgatggttcctggctcttcgatcattacagcctgcgcgatcgtctgggcgttcatggatcctacggtcattcagc

SEQ ID NO: 878 - DNA, 158 bp, synthetic construct
  misc_feature 1..158: note = Synthetic nucleic acid
  source 1..158: mol_type = other DNA
cagacgacggccagtgtcgacatgagtaagtctgaaaatctttacagcgcagcgcgcgagctgataacacttcttgcggcgatggttcctggctcttcgatcatcgatgctgcacgtcgggtgtttgcgaagttgagaggatcctacggtcattcagc

SEQ ID NO: 879 - DNA, 158 bp, synthetic construct
  misc_feature 1..158: note = Synthetic nucleic acid
  source 1..158: mol_type = other DNA
cagacgacggccagtgtcgacatgatgcctacgcttgctccaccatctgtcctttcggaacacttcttgcggcgatggttcctggctcttcgatcacatcaacaggagcagatccgcaaaatgctcgaatcagcaaaaggatcctacggtcattcagc

SEQ ID NO: 880 - DNA, 158 bp, synthetic construct
  misc_feature 1..158: note = Synthetic nucleic acid
  source 1..158: mol_type = other DNA
cagacgacggccagtgtcgacgtgaaacatctgacagaaatggtgagacagcacaaagcgggcaaaacaaataacacttcttgcggcgatggttcctggctcttcgatcagtaccacacagcctgtgaaggccaaccaggatcctacggtcattcagc

SEQ ID NO: 881 - DNA, 158 bp, synthetic construct
  misc_feature 1..158: note = Synthetic nucleic acid
  source 1..158: mol_type = other DNA
cagacgacggccagtgtcgacttgtttgaccgttatgatgctggtgagcaggcggtaaacacttcttgcggcgatggttcctggctcttcgatcgcctctgtaaacaagaaccggcgttgatcgattacctgatcgggggatcctacggtcattcagc

SEQ ID NO: 882 - DNA, 158 bp, synthetic construct
  misc_feature 1..158: note = Synthetic nucleic acid
  source 1..158: mol_type = other DNA
cagacgacggccagtgtcgacatgaaaacaacagcaaagctgtcgttcatgatgtttgttgaatggtttataacacttcttgcggcgatggttcctggctcttcgatcattgcgttgacacaaggggaagttaaacaaggatcctacggtcattcagc

SEQ ID NO: 883 - DNA, 158 bp, synthetic construct
  misc_feature 1..158: note = Synthetic nucleic acid
  source 1..158: mol_type = other DNA
cagacgacggccagtgtcgacatgaaaaccaaagttgctgctatttatggcaagcgggatgtccgtctgcaacacttcttgcggcgatggttcctggctcttcgatctggcgttgatatcggggaggccgcgcaaacgggatcctacggtcattcagc

SEQ ID NO: 884 - DNA, 158 bp, synthetic construct
  misc_feature 1..158: note = Synthetic nucleic acid
  source 1..158: mol_type = other DNA
cagacgacggccagtgtcgacatgaaaccgatgcatattgcaatggcgctgctctctgccgcaacacttcttgcggcgatggttcctggctcttcgatcaagctgaaaaacggcgcagcgaaaggagagcaggcagtaggatcctacggtcattcagc

SEQ ID NO: 885 - DNA, 158 bp, synthetic construct
  misc_feature 1..158: note = Synthetic nucleic acid
  source 1..158: mol_type = other DNA
cagacgacggccagtgtcgacatgcaacacaactcatatcgccgttggataaccctcgcgataattagttttaaacacttcttgcggcgatggttcctggctcttcgatccgcccccgcaatggctagcagcaagccgggatcctacggtcattcagc

SEQ ID NO: 886 - DNA, 158 bp, synthetic construct
  misc_feature 1..158: note = Synthetic nucleic acid
  source 1..158: mol_type = other DNA
cagacgacggccagtgtcgacatgctcgaattgctttacaccgcccttctctaccttattcagccaacacttcttgcggcgatggttcctggctcttcgatcctgctggaaccttacctgccaccgaaaacgcatttaggatcctacggtcattcagc

SEQ ID NO: 887 - DNA, 158 bp, synthetic construct
  misc_feature 1..158: note = Synthetic nucleic acid
  source 1..158: mol_type = other DNA
cagacgacggccagtgtcgacatggctgtgctgatttttctgggctgtctgttggaacacttcttgcggcgatggttcctggctcttcgatcttttattcccgatctcatcatcctccctttgaaatggattaatgaaggatcctacggtcattcagc

SEQ ID NO: 888 - DNA, 158 bp, synthetic construct
  misc_feature 1..158: note = Synthetic nucleic acid
  source 1..158: mol_type = other DNA
cagacgacggccagtgtcgacatgacagataaacgcaaagatggctcaggcaaattgctgtattgctctttttaacacttcttgcggcgatggttcctggctcttcgatcggaagcgcaacaggcatctggtgaatacggatcctacggtcattcagc

SEQ ID NO: 889 - DNA, 158 bp, synthetic construct
  misc_feature 1..158: note = Synthetic nucleic acid
  source 1..158: mol_type = other DNA
cagacgacggccagtgtcgacatggcaagcagtaacttgattaaacaattgcaagagcgggaacacttcttgcggcgatggttcctggctcttcgatctcgcggtaaaaagaattactgtctgatttgctggaaacctggatcctacggtcattcagc

SEQ ID NO: 890 - DNA, 158 bp, synthetic construct
  misc_feature 1..158: note = Synthetic nucleic acid
  source 1..158: mol_type = other DNA
cagacgacggccagtgtcgacgtggcaaaaaacattcaagccattcgcggcatgaacgattacctgcaacacttcttgcggcgatggttcctggctcttcgatccgtagccgcgcatttgcgcacgttactgggtcaaggatcctacggtcattcagc

SEQ ID NO: 891 - DNA, 158 bp, synthetic construct
  misc_feature 1..158: note = Synthetic nucleic acid
  source 1..158: mol_type = other DNA
cagacgacggccagtgtcgacatgcagcacaacacactatcgaaacacaatcagaaattgccgtttaaacacttcttgcggcgatggttcctggctcttcgatcatgcttgtcgccactgttgaagctgattgagtcgggatcctacggtcattcagc

SEQ ID NO: 892 - DNA, 158 bp, synthetic construct
  misc_feature 1..158: note = Synthetic nucleic acid
  source 1..158: mol_type = other DNA
cagacgacggccagtgtcgacatgcagtataaagatgaaaacggcgtgaatgaaccgtcacgcaacacttcttgcggcgatggttcctggctcttcgatccgaacgattatttcggaagcgcgttattgcgggttccgggatcctacggtcattcagc

SEQ ID NO: 893 - DNA, 158 bp, synthetic construct
  misc_feature 1..158: note = Synthetic nucleic acid
  source 1..158: mol_type = other DNA
cagacgacggccagtgtcgacatggaagacgactgcgacattattattattggtgccggtattgcaaacacttcttgcggcgatggttcctggctcttcgatccgggcgatgttatcaggagtctgcgatgtctgtctggatcctacggtcattcagc

SEQ ID NO: 894 - DNA, 158 bp, synthetic construct
  misc_feature 1..158: note = Synthetic nucleic acid
  source 1..158: mol_type = other DNA
cagacgacggccagtgtcgacatggctggcttaccgaacagcagtaacgcgctgcaacagtggaacacttcttgcggcgatggttcctggctcttcgatccccgaatcggtcaacggctgccaggaggtgcaagagttggatcctacggtcattcagc

SEQ ID NO: 895 - DNA, 158 bp, synthetic construct
  misc_feature 1..158: note = Synthetic nucleic acid
  source 1..158: mol_type = other DNA
cagacgacggccagtgtcgacatgattatcaaacgcactcctcaagccgcgtcgcctctggaacacttcttgcggcgatggttcctggctcttcgatccatggaagtgattgacgcgaggagaagcggtggcaagagcggatcctacggtcattcagc

SEQ ID NO: 896 - DNA, 158 bp, synthetic construct
  misc_feature 1..158: note = Synthetic nucleic acid
  source 1..158: mol_type = other DNA
cagacgacggccagtgtcgacatgtatgattttgtgattattggcggcggcatcatcggcataacacttcttgcggcgatggttcctggctcttcgatccgtagtgtggatgccttacacgccgcatttaatcaaacgggatcctacggtcattcagc

SEQ ID NO: 897 - DNA, 158 bp, synthetic construct
  misc_feature 1..158: note = Synthetic nucleic acid
  source 1..158: mol_type = other DNA
cagacgacggccagtgtcgacatgtttgccctctgtgatgtaaacgcgttttatgccaaacacttcttgcggcgatggttcctggctcttcgatcacgttatacaacgcgaagttctgatttactgagggtcaaaggcggatcctacggtcattcagc

SEQ ID NO: 898 - DNA, 158 bp, synthetic construct
  misc_feature 1..158: note = Synthetic nucleic acid
  source 1..158: mol_type = other DNA
cagacgacggccagtgtcgacatgagaaaaatagtggccatggccgttatttgcctgacgaacacttcttgcggcgatggttcctggctcttcgatcatgtgaaaatgagtattcagtatgactttatgctgaagtttggatcctacggtcattcagc

SEQ ID NO: 899 - DNA, 158 bp, synthetic construct
  misc_feature 1..158: note = Synthetic nucleic acid
  source 1..158: mol_type = other DNA
cagacgacggccagtgtcgacatgagcaaaacacatttaacagaacagaagttttccgacttcgccctgcataacacttcttgcggcgatggttcctggctcttcgatcctccgcgtaatcgtcgtcgttcaggttcaggatcctacggtcattcagc

SEQ ID NO: 900 - DNA, 158 bp, synthetic construct
  misc_feature 1..158: note = Synthetic nucleic acid
  source 1..158: mol_type = other DNA
cagacgacggccagtgtcgacatgagcaacaatgaattccatcagcgtcgtctttctgccactaacacttcttgcggcgatggttcctggctcttcgatccggcaatgaaaattttgcaggatgcgctgagcgattgtggatcctacggtcattcagc

SEQ ID NO: 901 - DNA, 158 bp, synthetic construct
  misc_feature 1..158: note = Synthetic nucleic acid
  source 1..158: mol_type = other DNA
cagacgacggccagtgtcgacatgctcacgaaaaagaaatgggcgttatttagtctattaacactgtgtggaacacttcttgcggcgatggttcctggctcttcgatcaagaaagagatgctggcggctgaagctcttggatcctacggtcattcagc

SEQ ID NO: 902 - DNA, 158 bp, synthetic construct
  misc_feature 1..158: note = Synthetic nucleic acid
  source 1..158: mol_type = other DNA
cagacgacggccagtgtcgacatggcttctacttttaccagcgacacattgcctgccgatcaaacacttcttgcggcgatggttcctggctcttcgatcaacattcacggtaagcgagcgttgggcatggatgttgtcggatcctacggtcattcagc

SEQ ID NO: 903 - DNA, 158 bp, synthetic construct
  misc_feature 1..158: note = Synthetic nucleic acid
  source 1..158: mol_type = other DNA
cagacgacggccagtgtcgacatgtctcaaaataaggctttcagcacgccatttatcctggctaacacttcttgcggcgatggttcctggctcttcgatctttgcacccggttaaacacaattaagcatagaggtgatggatcctacggtcattcagc

SEQ ID NO: 904 - DNA, 158 bp, synthetic construct
  misc_feature 1..158: note = Synthetic nucleic acid
  source 1..158: mol_type = other DNA
cagacgacggccagtgtcgacgtgtcaaaggcaaccgaacaaaacgacaagctcaagcaacacttcttgcggcgatggttcctggctcttcgatcatatgaagtgttcaaaaacgcgccattggacttcaaaccgtttggatcctacggtcattcagc

SEQ ID NO: 905 - DNA, 158 bp, synthetic construct
  misc_feature 1..158: note = Synthetic nucleic acid
  source 1..158: mol_type = other DNA
cagacgacggccagtgtcgacatgaaaacgttaattgcccggcataaagctggtgaacatatcggcatatgttaacacttcttgcggcgatggttcctggctcttcgatccgcctatcgctacggctgtgcggaatcgggatcctacggtcattcagc

SEQ ID NO: 906 - DNA, 158 bp, synthetic construct
  misc_feature 1..158: note = Synthetic nucleic acid
  source 1..158: mol_type = other DNA
cagacgacggccagtgtcgacatgagttttgcgaccatttctgttatcggactgggttatatcgggctaacacttcttgcggcgatggttcctggctcttcgatctatgtcgtcgatgccaaaggagtctggcgcttgggatcctacggtcattcagc

SEQ ID NO: 907 - DNA, 158 bp, synthetic construct
  misc_feature 1..158: note = Synthetic nucleic acid
  source 1..158: mol_type = other DNA
cagacgacggccagtgtcgacatgatcaaggcgacggacagaaaactggtagtaggactgaacacttcttgcggcgatggttcctggctcttcgatcggatcaagcgactcaatagttggctgcgaaaagagtttgtaggatcctacggtcattcagc

SEQ ID NO: 908 - DNA, 158 bp, synthetic construct
  misc_feature 1..158: note = Synthetic nucleic acid
  source 1..158: mol_type = other DNA
cagacgacggccagtgtcgacatgccacattcactgttcagcaccgataccgatctcaccaacacttcttgcggcgatggttcctggctcttcgatcgccagaccatcgaagaattactggcgctggaattgctttggggatcctacggtcattcagc

SEQ ID NO: 909 - DNA, 158 bp, synthetic construct
  misc_feature 1..158: note = Synthetic nucleic acid
  source 1..158: mol_type = other DNA
cagacgacggccagtgtcgacatgaatcttaccgaattaaagaatacgccggtttctgagctgatcaaacacttcttgcggcgatggttcctggctcttcgatctgacgatttcttcgaaatgatgaaacgctcacacggatcctacggtcattcagc

SEQ ID NO: 910 - DNA, 158 bp, synthetic construct
  misc_feature 1..158: note = Synthetic nucleic acid
  source 1..158: mol_type = other DNA
cagacgacggccagtgtcgacatgacacgggccgtgaaaccgcgcaggtttgcaatcaggaacacttcttgcggcgatggttcctggctcttcgatcagggtcaggcggtcaatccacagccgtggttgggaagacggggatcctacggtcattcagc

SEQ ID NO: 911 - DNA, 158 bp, synthetic construct
  misc_feature 1..158: note = Synthetic nucleic acid
  source 1..158: mol_type = other DNA
cagacgacggccagtgtcgacatgaccactcaactggaacaggcctgggagctagcgaaaaacacttcttgcggcgatggttcctggctcttcgatctgcgggcttatgagaaagaaattttgagtcgccgcgggcagggatcctacggtcattcagc

SEQ ID NO: 912 - DNA, 158 bp, synthetic construct
  misc_feature 1..158: note = Synthetic nucleic acid
  source 1..158: mol_type = other DNA
cagacgacggccagtgtcgacatgcgctttgatactgtcattatgggcggcggcctcgccgaacacttcttgcggcgatggttcctggctcttcgatccgctcaacagattgcccaacgcgcaggaggccaacaaggtggatcctacggtcattcagc

SEQ ID NO: 913 - DNA, 158 bp, synthetic construct
  misc_feature 1..158: note = Synthetic nucleic acid
  source 1..158: mol_type = other DNA
cagacgacggccagtgtcgacatggataaatttcgtgttcaggggccaacgaagctccaggaacacttcttgcggcgatggttcctggctcttcgatccgctttaggtgcaaatattgagcgtgtgaaaggcgaaattggatcctacggtcattcagc

SEQ ID NO: 914 - DNA, 158 bp, synthetic construct
  misc_feature 1..158: note = Synthetic nucleic acid
  source 1..158: mol_type = other DNA
cagacgacggccagtgtcgacatggcgtggaatcagcccggtaataacggacaagaccgcgaccaacacttcttgcggcgatggttcctggctcttcgatccgcgcagcgtaacgactaccagcgtcagggggaaggatcctacggtcattcagccgc

SEQ ID NO: 915 - DNA, 158 bp, synthetic construct
  misc_feature 1..158: note = Synthetic nucleic acid
  source 1..158: mol_type = other DNA
cagacgacggccagtgtcgacatgtttacatcagtggcgcaagccaatgctgcggttatcgaaaacacttcttgcggcgatggttcctggctcttcgatccgctggaagcactggctgaaagcatgggtattggtcagggatcctacggtcattcagc

SEQ ID NO: 916 - DNA, 158 bp, synthetic construct
  misc_feature 1..158: note = Synthetic nucleic acid
  source 1..158: mol_type = other DNA
cagacgacggccagtgtcgacgtgtcgcaagataacaactttagccaggggccagtcccgaacacttcttgcggcgatggttcctggctcttcgatccagcagcaatgacgcatgtggaggctaacagtgtcgaagctggatcctacggtcattcagc

SEQ ID NO: 917 - DNA, 158 bp, synthetic construct
  misc_feature 1..158: note = Synthetic nucleic acid
  source 1..158: mol_type = other DNA
cagacgacggccagtgtcgacatgaatcttaagctgcagctgaaaatcctctcttttctgcagttctgtctaacacttcttgcggcgatggttcctggctcttcgatcccgacaggcacacagacggttagccacggtggatcctacggtcattcagc

SEQ ID NO: 918 - DNA, 158 bp, synthetic construct
  misc_feature 1..158: note = Synthetic nucleic acid
  source 1..158: mol_type = other DNA
cagacgacggccagtgtcgacatgacccttttagcactcggtatcaaccataaaacggcacctgtatcaacacttcttgcggcgatggttcctggctcttcgatcaatattctgcgcgacagcctcgggctggagccaggatcctacggtcattcagc

SEQ ID NO: 919 - DNA, 158 bp, synthetic construct
  misc_feature 1..158: note = Synthetic nucleic acid
  source 1..158: mol_type = other DNA
cagacgacggccagtgtcgacatgagcatcgcgatgcgcttaaaggtaatgtcctttttgaacacttcttgcggcgatggttcctggctcttcgatcatgaccctgaaaagataaagcatcgagcggtgactcataacggatcctacggtcattcagc

SEQ ID NO: 920 - DNA, 158 bp, synthetic construct
  misc_feature 1..158: note = Synthetic nucleic acid
  source 1..158: mol_type = other DNA
cagacgacggccagtgtcgacatgagtggactcaaacaagaactggggctggcccaggaacacttcttgcggcgatggttcctggctcttcgatcgctgccaaaacgaaaaacgccggaaaatggcataaccacagaaggatcctacggtcattcagc

SEQ ID NO: 921 - DNA, 158 bp, synthetic construct
  misc_feature 1..158: note = Synthetic nucleic acid
  source 1..158: mol_type = other DNA
cagacgacggccagtgtcgacatgctccatccgcgagccagaaccatgttgttattatcgctccaacacttcttgcggcgatggttcctggctcttcgatctcgtccgaagcaacagccaccccacgataacgtttatggatcctacggtcattcagc

SEQ ID NO: 922 - DNA, 158 bp, synthetic construct
  misc_feature 1..158: note = Synthetic nucleic acid
  source 1..158: mol_type = other DNA
cagacgacggccagtgtcgacatgggatctgatgcgaaaaacttgatgagcgacgggaacgtgcaaattgttaaaacacttcttgcggcgatggttcctggctcttcgatcattggcgcaacgctccagcctgcgcccggatcctacggtcattcagc

SEQ ID NO: 923 - DNA, 158 bp, synthetic construct
  misc_feature 1..158: note = Synthetic nucleic acid
  source 1..158: mol_type = other DNA
cagacgacggccagtgtcgacatgttccaccgtctgcttatcgcaacagtcgtcggtattctcgaacacttcttgcggcgatggttcctggctcttcgatcctctatctaccgccagcacactgcgcagcatagcatgggatcctacggtcattcagc

SEQ ID NO: 924 - DNA, 158 bp, synthetic construct
  misc_feature 1..158: note = Synthetic nucleic acid
  source 1..158: mol_type = other DNA
cagacgacggccagtgtcgacatgacattctccctttttggtgacaaatttacccgccactccaacacttcttgcggcgatggttcctggctcttcgatccggaagagatagaaagagcctgggctgaaagtcaccaaggatcctacggtcattcagc

SEQ ID NO: 925 - DNA, 158 bp, synthetic construct
  misc_feature 1..158: note = Synthetic nucleic acid
  source 1..158: mol_type = other DNA
cagacgacggccagtgtcgacatgctggaacaaatgggcattgccgcgaagcaagaacacttcttgcggcgatggttcctggctcttcgatccacttacaagtggatcggcattggtgattacaccattcgtgcgacaggatcctacggtcattcagc

SEQ ID NO: 926 - DNA, 158 bp, synthetic construct
  misc_feature 1..158: note = Synthetic nucleic acid
  source 1..158: mol_type = other DNA
cagacgacggccagtgtcgacatgtgcgaacatcatcatgccgcgaagcacatcctgtaacacttcttgcggcgatggttcctggctcttcgatcgtcgtgggatcgtcaacctgaatcagagcatgaggagtccccgggatcctacggtcattcagc

SEQ ID NO: 927 - DNA, 158 bp, synthetic construct
  misc_feature 1..158: note = Synthetic nucleic acid
  source 1..158: mol_type = other DNA
cagacgacggccagtgtcgacatgttaaagcgtgaaatgaacattgccgattatgatgccgaactgtgaacacttcttgcggcgatggttcctggctcttcgatcgacatctgcgcacgttacccggtttacgcaattggatcctacggtcattcagc

SEQ ID NO: 928 - DNA, 158 bp, synthetic construct
  misc_feature 1..158: note = Synthetic nucleic acid
  source 1..158: mol_type = other DNA
cagacgacggccagtgtcgacgtgagccgtactacaactgttgatggcgctccggcaagcgacactaacacttcttgcggcgatggttcctggctcttcgatctcgggacgcgtttgcatcgtcgtctgcacgccataggatcctacggtcattcagc

SEQ ID NO: 929 - DNA, 158 bp, synthetic construct
  misc_feature 1..158: note = Synthetic nucleic acid
  source 1..158: mol_type = other DNA
cagacgacggccagtgtcgacgtgagtcactgggctacattcaaacaaacagcaacaaatttatgggtaacacttcttgcggcgatggttcctggctcttcgatcaaagctgacagtaaagaatcggcgcaaaaatgtggatcctacggtcattcagc

SEQ ID NO: 930 - DNA, 158 bp, synthetic construct
  misc_feature 1..158: note = Synthetic nucleic acid
  source 1..158: mol_type = other DNA
cagacgacggccagtgtcgacatgaataaacaatcctggctgcttaacctcagcctgttgaaaacgcacccgaacacttcttgcggcgatggttcctggctcttcgatccgccgcaggtgacagcgtccgacagtcttggatcctacggtcattcagc

SEQ ID NO: 931 - DNA, 158 bp, synthetic construct
  misc_feature 1..158: note = Synthetic nucleic acid
  source 1..158: mol_type = other DNA
cagacgacggccagtgtcgacatggaaagtaaagtagttgttccggcacaaggcaagaagatcaaacacttcttgcggcgatggttcctggctcttcgatcttcagagtttggtgacgcgatcatcgaaaacatggcgggatcctacggtcattcagc

SEQ ID NO: 932 - DNA, 158 bp, synthetic construct
  misc_feature 1..158: note = Synthetic nucleic acid
  source 1..158: mol_type = other DNA
cagacgacggccagtgtcgacatggatataatgagaagtgttgtggggatggtggtgttactggcaataaacacttcttgcggcgatggttcctggctcttcgatcctattgccgggttctttattggtctggcgctgggatcctacggtcattcagc

SEQ ID NO: 933 - DNA, 158 bp, synthetic construct
  misc_feature 1..158: note = Synthetic nucleic acid
  source 1..158: mol_type = other DNA
cagacgacggccagtgtcgacatggatgtcatgagaagtgttctgggaatggtggtattgctgaaacacttcttgcggcgatggttcctggctcttcgatctgcgaccattgccgggttctttattggtttagcttgcggatcctacggtcattcagc

SEQ ID NO: 934 - DNA, 158 bp, synthetic construct
  misc_feature 1..158: note = Synthetic nucleic acid
  source 1..158: mol_type = other DNA
cagacgacggccagtgtcgacatgtcaactccacttcaaggaattaaagttctcgatttcaccggtaacacttcttgcggcgatggttcctggctcttcgatcaaattgctgcaatgaagcaaaaccacgccatcccgggatcctacggtcattcagc

SEQ ID NO: 935 - DNA, 158 bp, synthetic construct
  misc_feature 1..158: note = Synthetic nucleic acid
  source 1..158: mol_type = other DNA
cagacgacggccagtgtcgacatgtcgttggcaaaagcgtccttgtggacggcggcaacacttcttgcggcgatggttcctggctcttcgatctctctttgttgtggcgtgtttttactctggcgtaggcgggcaccgggatcctacggtcattcagc

SEQ ID NO: 936 - DNA, 158 bp, synthetic construct
  misc_feature 1..158: note = Synthetic nucleic acid
  source 1..158: mol_type = other DNA
cagacgacggccagtgtcgacatgaaaggtagttataaatcccgttgggtaatcgtaatcgtggtggttataacacttcttgcggcgatggttcctggctcttcgatcgaatacgcgaaaaaaggagcacgctccggatcctacggtcattcagccgc

SEQ ID NO: 937 - DNA, 158 bp, synthetic construct
  misc_feature 1..158: note = Synthetic nucleic acid
  source 1..158: mol_type = other DNA
cagacgacggccagtgtcgacatgactgatcaagctgaaaaaaagcactctgcattttggggtaacacttcttgcggcgatggttcctggctcttcgatctcggcaacgtctttaacgtgttacctaaatttggcctcggatcctacggtcattcagc

SEQ ID NO: 938 - DNA, 158 bp, synthetic construct
  misc_feature 1..158: note = Synthetic nucleic acid
  source 1..158: mol_type = other DNA
cagacgacggccagtgtcgacatgcaggatttaatatcccaggttgaagatttagcgggtattgagatcgataacacttcttgcggcgatggttcctggctcttcgatcgctctctggcgggtgcatttaagcaggtgggatcctacggtcattcagc

SEQ ID NO: 939 - DNA, 158 bp, synthetic construct
  misc_feature 1..158: note = Synthetic nucleic acid
  source 1..158: mol_type = other DNA
cagacgacggccagtgtcgacatggccattaaaaaacgcagtgcaaccgttgtgcaacacttcttgcggcgatggttcctggctcttcgatctctgatgatgttccgtaaaggcaaattgttaatcgatagcctgacaggatcctacggtcattcagc

SEQ ID NO: 940 - DNA, 158 bp, synthetic construct
  misc_feature 1..158: note = Synthetic nucleic acid
  source 1..158: mol_type = other DNA
cagacgacggccagtgtcgacatggcgggacccgttttgtatcaggaccgcgccatgaaacaaacacttcttgcggcgatggttcctggctcttcgatcgaaggcggccagctgtggatcaccgaaactgatcgcgaaggatcctacggtcattcagc

SEQ ID NO: 941 - DNA, 158 bp, synthetic construct
  misc_feature 1..158: note = Synthetic nucleic acid
  source 1..158: mol_type = other DNA
cagacgacggccagtgtcgacatgacacaggcaaacctgagcgaaaccctgttcaaacaacacttcttgcggcgatggttcctggctcttcgatctcttcaggaaatcaccgactggatcgaaaaacgcttgtgtggcggatcctacggtcattcagc

SEQ ID NO: 942 - DNA, 158 bp, synthetic construct
  misc_feature 1..158: note = Synthetic nucleic acid
  source 1..158: mol_type = other DNA
cagacgacggccagtgtcgacatgactacgcaacgttcaccggggctattccggcgtaacacttcttgcggcgatggttcctggctcttcgatcaggcagaagacgatcgtctggcaaatagcgccctgcgtaataccggatcctacggtcattcagc

SEQ ID NO: 943 - DNA, 158 bp, synthetic construct
  misc_feature 1..158: note = Synthetic nucleic acid
  source 1..158: mol_type = other DNA
cagacgacggccagtgtcgacatgcgtttatctctccctcgcctgaaaatgccgcgcctaacacttcttgcggcgatggttcctggctcttcgatccgtctggagaaagcgcaggcgtttgtacgaggttcacgacaaggatcctacggtcattcagc

SEQ ID NO: 944 - DNA, 158 bp, synthetic construct
  misc_feature 1..158: note = Synthetic nucleic acid
  source 1..158: mol_type = other DNA
cagacgacggccagtgtcgacatggcaacactaaccaccacccaaacgtcaccaacacttcttgcggcgatggttcctggctcttcgatcctggtgcatattttatcgagctttaatttactgccggtgtatcagttaggatcctacggtcattcagc

SEQ ID NO: 945 - DNA, 158 bp, synthetic construct
  misc_feature 1..158: note = Synthetic nucleic acid
  source 1..158: mol_type = other DNA
cagacgacggccagtgtcgacatggcgatgcctttatcgttattaattggcctgcgttttagtcgcgaacacttcttgcggcgatggttcctggctcttcgatctattgaccctgcgcgagtccttagcggccaggcgggatcctacggtcattcagc

SEQ ID NO: 946 - DNA, 158 bp, synthetic construct
  misc_feature 1..158: note = Synthetic nucleic acid
  source 1..158: mol_type = other DNA
cagacgacggccagtgtcgacatgaaatggtttaacaccctaagccacaaccgttggctggaaaacacttcttgcggcgatggttcctggctcttcgatccggttgcagcgggtctgctggatattaatgcgaaattgggatcctacggtcattcagc

SEQ ID NO: 947 - DNA, 158 bp, synthetic construct
  misc_feature 1..158: note = Synthetic nucleic acid
  source 1..158: mol_type = other DNA
cagacgacggccagtgtcgacatgaaatgtagctggcgcgaaggcaataagatccagttgctaacacttcttgcggcgatggttcctggctcttcgatcgatcgggtagaaactgaaaacacgggggtaaaaccctttggatcctacggtcattcagc

SEQ ID NO: 948 - DNA, 158 bp, synthetic construct
  misc_feature 1..158: note = Synthetic nucleic acid
  source 1..158: mol_type = other DNA
cagacgacggccagtgtcgacatgaacaaaacgctaatcgccgcagctgtggcaaacacttcttgcggcgatggttcctggctcttcgatcgcccgatggataagtttgatagcgtgttgaatgaagcggtgaaaggcggatcctacggtcattcagc

SEQ ID NO: 949 - DNA, 158 bp, synthetic construct
  misc_feature 1..158: note = Synthetic nucleic acid
  source 1..158: mol_type = other DNA
cagacgacggccagtgtcgacatggcaagaaaaaccaagccgttaactgatacggaaatcaaagcaacacttcttgcggcgatggttcctggctcttcgatcttaactcatttgagcaaaattcgtcttgtcggatgtggatcctacggtcattcagc

SEQ ID NO: 950 - DNA, 158 bp, synthetic construct
  misc_feature 1..158: note = Synthetic nucleic acid
  source 1..158: mol_type = other DNA
cagacgacggccagtgtcgacgtgtctaagcgtcgtgtagttgtgaccggactggaacacttcttgcggcgatggttcctggctcttcgatccggcttcggtggcactaatggttctttgatctttaaaaagatcggatcctacggtcattcagccgc

SEQ ID NO: 951 - DNA, 158 bp, synthetic construct
  misc_feature 1..158: note = Synthetic nucleic acid
  source 1..158: mol_type = other DNA
cagacgacggccagtgtcgacatgaaagcattgacttatcacggcccacatcacgttcaggtagaaaataacacttcttgcggcgatggttcctggctcttcgatctggtgaatgcgatgccggggggaacaatacacggatcctacggtcattcagc

SEQ ID NO: 952 - DNA, 158 bp, synthetic construct
  misc_feature 1..158: note = Synthetic nucleic acid
  source 1..158: mol_type = other DNA
cagacgacggccagtgtcgacatgaagcaatggatagccgcactactgttgatgctgatacccaacacttcttgcggcgatggttcctggctcttcgatctggtgtttatcacgccacgactggtttccagtgagaacggatcctacggtcattcagc

SEQ ID NO: 953 - DNA, 158 bp, synthetic construct
  misc_feature 1..158: note = Synthetic nucleic acid
  source 1..158: mol_type = other DNA
cagacgacggccagtgtcgacatgacgaactatcgcgttgagagtagcagcggacgggcaacacttcttgcggcgatggttcctggctcttcgatcctgaatatctggttgttggtggggacggcgctgggattgaatggatcctacggtcattcagc

SEQ ID NO: 954 - DNA, 158 bp, synthetic construct
  misc_feature 1..158: note = Synthetic nucleic acid
  source 1..158: mol_type = other DNA
cagacgacggccagtgtcgacatgccgcaacaaaattatctggatgaactcactccggcttttaaacacttcttgcggcgatggttcctggctcttcgatcgattcatcactatttagagggagcttgctcatgttcaggatcctacggtcattcagc

SEQ ID NO: 955 - DNA, 158 bp, synthetic construct
  misc_feature 1..158: note = Synthetic nucleic acid
  source 1..158: mol_type = other DNA
cagacgacggccagtgtcgacatggctgacactcgccctgaacgtcgctttacgcaacacttcttgcggcgatggttcctggctcttcgatctttactacccgccagcagcaaacatattcacgaaaacgcggaatccggatcctacggtcattcagc

SEQ ID NO: 956 - DNA, 158 bp, synthetic construct
  misc_feature 1..158: note = Synthetic nucleic acid
  source 1..158: mol_type = other DNA
cagacgacggccagtgtcgacgtgaagatttatctggtcggtggtgctgttcgggatgcattgttaaacacttcttgcggcgatggttcctggctcttcgatcgctggaaggaacaacgttgcccaaagcctgaacaaggatcctacggtcattcagc

SEQ ID NO: 957 - DNA, 158 bp, synthetic construct
  misc_feature 1..158: note = Synthetic nucleic acid
  source 1..158: mol_type = other DNA
cagacgacggccagtgtcgacatgattacacatttccgtcaagctatagaagaaacgctgccctaacacttcttgcggcgatggttcctggctcttcgatcggcactcatgctttatcaacttgcctggcagaaagccggatcctacggtcattcagc

SEQ ID NO: 958 - DNA, 158 bp, synthetic construct
  misc_feature 1..158: note = Synthetic nucleic acid
  source 1..158: mol_type = other DNA
cagacgacggccagtgtcgacatgctgcaacaggttccaacgcgtgcttttcatgtgataacacttcttgcggcgatggttcctggctcttcgatcagcgacattatgcatgcgcatttgctggtggtgagtaagcatggatcctacggtcattcagc

SEQ ID NO: 959 - DNA, 158 bp, synthetic construct
  misc_feature 1..158: note = Synthetic nucleic acid
  source 1..158: mol_type = other DNA
cagacgacggccagtgtcgacatggaatttaccaccggattgatgtcgctcgacaccgcgaacacttcttgcggcgatggttcctggctcttcgatctggaagtagaaccgtttaacgcgttgttcggaggcctgcaaggatcctacggtcattcagc

SEQ ID NO: 960 - DNA, 158 bp, synthetic construct
  misc_feature 1..158: note = Synthetic nucleic acid
  source 1..158: mol_type = other DNA
cagacgacggccagtgtcgacatgtctaaattaccaacaggtgtcgagattagaggtagatacattcgcatctaacacttcttgcggcgatggttcctggctcttcgatcagccatgttgaatgcgcggttatcgttgggatcctacggtcattcagc

SEQ ID NO: 961 - DNA, 158 bp, synthetic construct
  misc_feature 1..158: note = Synthetic nucleic acid
  source 1..158: mol_type = other DNA
cagacgacggccagtgtcgacatgttaacgaaagatctttcgattactttttgcggcgtgaagtttccaacacttcttgcggcgatggttcctggctcttcgatcaaaggcgagaaagaacacccggtaacgttgactggatcctacggtcattcagc

SEQ ID NO: 962 - DNA, 158 bp, synthetic construct
  misc_feature 1..158: note = Synthetic nucleic acid
  source 1..158: mol_type = other DNA
cagacgacggccagtgtcgacatgattacgcacaacttcaataccctggacttactcaccagtcctgtctggatcgtttaacacttcttgcggcgatggttcctggctcttcgatccaaccgcgtgctggcggcatacggatcctacggtcattcagc

SEQ ID NO: 963 - DNA, 158 bp, synthetic construct
  misc_feature 1..158: note = Synthetic nucleic acid
  source 1..158: mol_type = other DNA
cagacgacggccagtgtcgacatgcaaaataaattagcttccggtgccaggcttggaaacacttcttgcggcgatggttcctggctcttcgatctctttttaaaagataaacagatgggaaattctcacgaaggggtaggatcctacggtcattcagc

SEQ ID NO: 964 - DNA, 158 bp, synthetic construct
  misc_feature 1..158: note = Synthetic nucleic acid
  source 1..158: mol_type = other DNA
cagacgacggccagtgtcgacatgccacgtttttttacccgccatgccgccacgctgtttttcaacacttcttgcggcgatggttcctggctcttcgatcgccagcatcaggcagccgagctagtggaggagcagatgggatcctacggtcattcagc

SEQ ID NO: 965 - DNA, 158 bp, synthetic construct
  misc_feature 1..158: note = Synthetic nucleic acid
  source 1..158: mol_type = other DNA
cagacgacggccagtgtcgacatggcaaaggtatcgctggagaaagacaagattaagtttctgctggtagaaaacacttcttgcggcgatggttcctggctcttcgatcgtaccattcgcgcccgtctgctgtaccacggatcctacggtcattcagc

SEQ ID NO: 966 - DNA, 158 bp, synthetic construct
  misc_feature 1..158: note = Synthetic nucleic acid
  source 1..158: mol_type = other DNA
cagacgacggccagtgtcgacatgtcgctgccgcacctctcccttgctgatgcgcgtaatcttaacacttcttgcggcgatggttcctggctcttcgatcattgccgcaccggctgggaaatagaccccgtcgcacatggatcctacggtcattcagc

SEQ ID NO: 967 - DNA, 158 bp, synthetic construct
  misc_feature 1..158: note = Synthetic nucleic acid
  source 1..158: mol_type = other DNA
cagacgacggccagtgtcgacatgtcgtcatttgattacctgaaaactgccatcaagcaacagggctgaacacttcttgcggcgatggttcctggctcttcgatcctggtgcgggagatgatgggggagcagagactcggatcctacggtcattcagc

SEQ ID NO: 968 - DNA, 158 bp, synthetic construct
  misc_feature 1..158: note = Synthetic nucleic acid
  source 1..158: mol_type = other DNA
cagacgacggccagtgtcgacatgtacaaacaagctgttattctcctgctgatgctgtttaccgcaagtgtaacacttcttgcggcgatggttcctggctcttcgatccggctggtgagtaaccagccgcagggacggggatcctacggtcattcagc

SEQ ID NO: 969 - DNA, 158 bp, synthetic construct
  misc_feature 1..158: note = Synthetic nucleic acid
  source 1..158: mol_type = other DNA
cagacgacggccagtgtcgacatgtctaatatttggtctaaagaagaaactctgtggagtttcgcgctctaaacacttcttgcggcgatggttcctggctcttcgatcctgtgcgtatcggtaatgttctttagcacaggatcctacggtcattcagc

SEQ ID NO: 970 - DNA, 158 bp, synthetic construct
  misc_feature 1..158: note = Synthetic nucleic acid
  source 1..158: mol_type = other DNA
cagacgacggccagtgtcgacatgaattacgaattactgaccactgaaaatgccccggtaaaaatgtggaaacacttcttgcggcgatggttcctggctcttcgatccctgcgtcaggtggtgtgcgtaaaaggatggggatcctacggtcattcagc

SEQ ID NO: 971 - DNA, 158 bp, synthetic construct
  misc_feature 1..158: note = Synthetic nucleic acid
  source 1..158: mol_type = other DNA
cagacgacggccagtgtcgacatgatggataacgataattctcttaataagcgccccacgtttaaaagagcattaaacacttcttgcggcgatggttcctggctcttcgatcagcgtgccgaaaagctggtgagactaggatcctacggtcattcagc

SEQ ID NO: 972 - DNA, 158 bp, synthetic construct
  misc_feature 1..158: note = Synthetic nucleic acid
  source 1..158: mol_type = other DNA
cagacgacggccagtgtcgacatggataaactacttgagcgatttttgaactacgtgtctctggatacccaataacacttcttgcggcgatggttcctggctcttcgatctgccgagttaacggcgcaacggaagcggggatcctacggtcattcagc

SEQ ID NO: 973 - DNA, 158 bp, synthetic construct
  misc_feature 1..158: note = Synthetic nucleic acid
  source 1..158: mol_type = other DNA
cagacgacggccagtgtcgacatggcgcgatttgtggtgttagtgattgatagctttggcgtaaacacttcttgcggcgatggttcctggctcttcgatcttctttcctccctccggtttgcaggagacaccctagttggatcctacggtcattcagc

SEQ ID NO: 974 - DNA, 158 bp, synthetic construct
  misc_feature 1..158: note = Synthetic nucleic acid
  source 1..158: mol_type = other DNA
cagacgacggccagtgtcgacatgggaattaacgaaatcatcatgtacatcatgatgttctttatgctgatagctgcaacacttcttgcggcgatggttcctggctcttcgatcaccgaagcggaggcacaatcgtcgggatcctacggtcattcagc

SEQ ID NO: 975 - DNA, 158 bp, synthetic construct
  misc_feature 1..158: note = Synthetic nucleic acid
  source 1..158: mol_type = other DNA
cagacgacggccagtgtcgacatgtcaccctgtgaaaatgacacccctataaactggaaacgaaaaacacttcttgcggcgatggttcctggctcttcgatcctacgtcgtcgtcgaataccccaggtatcgaacggtggatcctacggtcattcagc

SEQ ID NO: 976 - DNA, 158 bp, synthetic construct
  misc_feature 1..158: note = Synthetic nucleic acid
  source 1..158: mol_type = other DNA
cagacgacggccagtgtcgacatgaaaaaaatcgcgcttattatcggcagcatgatcgcgggcggtattatttaacacttcttgcggcgatggttcctggctcttcgatcctctgaaagtgctacccatgcgcatggaggatcctacggtcattcagc

SEQ ID NO: 977 - DNA, 158 bp, synthetic construct
  misc_feature 1..158: note = Synthetic nucleic acid
  source 1..158: mol_type = other DNA
cagacgacggccagtgtcgacatgaaaatactggtctacggcattaactactcgccggagttaaaacacttcttgcggcgatggttcctggctcttcgatccgtgttacgtcaatttataaatgatattcggggagtaggatcctacggtcattcagc

SEQ ID NO: 978 - DNA, 158 bp, synthetic construct
  misc_feature 1..158: note = Synthetic nucleic acid
  source 1..158: mol_type = other DNA
cagacgacggccagtgtcgacatgaaacgtgcatttattatggtgctggactcattcggcataacacttcttgcggcgatggttcctggctcttcgatcggtacttctgatatggaatatggcaaagccatgttcactggatcctacggtcattcagc

SEQ ID NO: 979 - DNA, 158 bp, synthetic construct
  misc_feature 1..158: note = Synthetic nucleic acid
  source 1..158: mol_type = other DNA
cagacgacggccagtgtcgacatgcaaacccaattaactgaagagatgcggcagaacgaacacttcttgcggcgatggttcctggctcttcgatctcactggattgaaattgtagaacaagcccttgaaaaggaaagcggatcctacggtcattcagc

SEQ ID NO: 980 - DNA, 158 bp, synthetic construct
  misc_feature 1..158: note = Synthetic nucleic acid
  source 1..158: mol_type = other DNA
cagacgacggccagtgtcgacatgaaacgtgcagtgattactggcctgggcattgtttccagcataacacttcttgcggcgatggttcctggctcttcgatcaacgccacgctggtaatgcgcaagctgaaagatccaggatcctacggtcattcagc

SEQ ID NO: 981 - DNA, 158 bp, synthetic construct
  misc_feature 1..158: note = Synthetic nucleic acid
  source 1..158: mol_type = other DNA
cagacgacggccagtgtcgacatgaaggtcggcttctttttactgaaattcccgctgtcgtcagaaaaacacttcttgcggcgatggttcctggctcttcgatctcgagaactcgccagcttgctgcaggctttaataggatcctacggtcattcagc

SEQ ID NO: 982 - DNA, 158 bp, synthetic construct
  misc_feature 1..158: note = Synthetic nucleic acid
  source 1..158: mol_type = other DNA
cagacgacggccagtgtcgacatgacaccaggcggacaagctcagataggtaatgttgataacacttcttgcggcgatggttcctggctcttcgatctgctcaacggtattttgctccagcatttgctggaaaatagtggatcctacggtcattcagc

SEQ ID NO: 983 - DNA, 158 bp, synthetic construct
  misc_feature 1..158: note = Synthetic nucleic acid
  source 1..158: mol_type = other DNA
cagacgacggccagtgtcgacatgagcctggccggtaaaaaaatcgttctcggcgttaaacacttcttgcggcgatggttcctggctcttcgatccgacgagatcgtgacccgttatgatgaaaaaaatcgacgtccaggatcctacggtcattcagc

SEQ ID NO: 984 - DNA, 158 bp, synthetic construct
  misc_feature 1..158: note = Synthetic nucleic acid
  source 1..158: mol_type = other DNA
cagacgacggccagtgtcgacatggcaatgagtgaacaaccccagcctgtggcgaacacttcttgcggcgatggttcctggctcttcgatctggggatgttgaccatattcctgcctgataaccggcataaagacagtggatcctacggtcattcagc

SEQ ID NO: 985 - DNA, 158 bp, synthetic construct
  misc_feature 1..158: note = Synthetic nucleic acid
  source 1..158: mol_type = other DNA
cagacgacggccagtgtcgacatggcaattgaacaaacagcaattacacgcgcgactttcgatgaagtgatcctaacacttcttgcggcgatggttcctggctcttcgatcgcggtggcgaaggtggttggggcgagcggatcctacggtcattcagc

SEQ ID NO: 986 - DNA, 158 bp, synthetic construct
  misc_feature 1..158: note = Synthetic nucleic acid
  source 1..158: mol_type = other DNA
cagacgacggccagtgtcgacatgtctatttataaaattcctcttccgctcaatattctggaagctgcacgaaacacttcttgcggcgatggttcctggctcttcgatcaatgggggatactatgcaacaacgattatggatcctacggtcattcagc

SEQ ID NO: 987 - DNA, 158 bp, synthetic construct
  misc_feature 1..158: note = Synthetic nucleic acid
  source 1..158: mol_type = other DNA
cagacgacggccagtgtcgacatgtctcagccaattacgcgtgaaaactttgatgaatggatgatacaacacttcttgcggcgatggttcctggctcttcgatcttgcgaacactttgttagccgaggttcatcaacgggatcctacggtcattcagc

SEQ ID NO: 988 - DNA, 158 bp, synthetic construct
  misc_feature 1..158: note = Synthetic nucleic acid
  source 1..158: mol_type = other DNA
cagacgacggccagtgtcgacatgtttaagtcttttttcccaaagccgggaacgttttttctctcgaacacttcttgcggcgatggttcctggctcttcgatcacaaaattcaggaagtaacccataccttgagccatggatcctacggtcattcagc

SEQ ID NO: 989 - DNA, 158 bp, synthetic construct
  misc_feature 1..158: note = Synthetic nucleic acid
  source 1..158: mol_type = other DNA
cagacgacggccagtgtcgacgtggttgctgaaaaccagcctgggcacattgatcaaataaaaacacttcttgcggcgatggttcctggctcttcgatctataacggttctttgttgattcgtctgttgcagggtatcggatcctacggtcattcagc

SEQ ID NO: 990 - DNA, 158 bp, synthetic construct
  misc_feature 1..158: note = Synthetic nucleic acid
  source 1..158: mol_type = other DNA
cagacgacggccagtgtcgacatgaatattttgcaatttaatgtgcgactggcggaaggcgaacacttcttgcggcgatggttcctggctcttcgatcgatgctggaggagtatgtcaacttctatcagaatctggcgggatcctacggtcattcagc

SEQ ID NO: 991 - DNA, 158 bp, synthetic construct
  misc_feature 1..158: note = Synthetic nucleic acid
  source 1..158: mol_type = other DNA
cagacgacggccagtgtcgacatgagtagcgtagatattctggtccctgacctgcctgaatccgtagcaacacttcttgcggcgatggttcctggctcttcgatcgaagatccgacgcgtctgctgctggacgtgggaggatcctacggtcattcagc

SEQ ID NO: 992 - DNA, 158 bp, synthetic construct
  misc_feature 1..158: note = Synthetic nucleic acid
  source 1..158: mol_type = other DNA
cagacgacggccagtgtcgacatgcccgaacccgtagccgaacccgcgctaaacggattgcaacacttcttgcggcgatggttcctggctcttcgatcgcctccggaacacgtccctgaggccgcctcatcatctatcggatcctacggtcattcagc

SEQ ID NO: 993 - DNA, 158 bp, synthetic construct
  misc_feature 1..158: note = Synthetic nucleic acid
  source 1..158: mol_type = other DNA
cagacgacggccagtgtcgacatggatcatctacccatgccgaaattcgggccgttggcaacacttcttgcggcgatggttcctggctcttcgatccaggagttggtcagcaaaggtctggccaaagttgaggaccgtggatcctacggtcattcagc

SEQ ID NO: 994 - DNA, 158 bp, synthetic construct
  misc_feature 1..158: note = Synthetic nucleic acid
  source 1..158: mol_type = other DNA
cagacgacggccagtgtcgacatgtcaacttctatcagaatctgtagctacctgttgctgccgaacacttcttgcggcgatggttcctggctcttcgatccgtttattttgcgaaaagcgttaaatattacgaggagtggatcctacggtcattcagc

SEQ ID NO: 995 - DNA, 158 bp, synthetic construct
  misc_feature 1..158: note = Synthetic nucleic acid
  source 1..158: mol_type = other DNA
cagacgacggccagtgtcgacatgaaaaatccctatttccctaccgcacttgggttgtattttaattacctgaacacttcttgcggcgatggttcctggctcttcgatctaaaggaaaatgtcgctccgggtgggtacggatcctacggtcattcagc

SEQ ID NO: 996 - DNA, 158 bp, synthetic construct
  misc_feature 1..158: note = Synthetic nucleic acid
  source 1..158: mol_type = other DNA
cagacgacggccagtgtcgacatgaaattaccgatttatctcgactactccgcaaccacgccgaacacttcttgcggcgatggttcctggctcttcgatcgcgtggatctgaacagcatcgaatgggctcatcatacaggatcctacggtcattcagc

SEQ ID NO: 997 - DNA, 158 bp, synthetic construct
  misc_feature 1..158: note = Synthetic nucleic acid
  source 1..158: mol_type = other DNA
cagacgacggccagtgtcgacatgaagatcgtaaaggctgaagtttttgttacctgtccggggcgtaatttaacacttcttgcggcgatggttcctggctcttcgatcctggaagatggcacgctgtggaactggccaggatcctacggtcattcagc

SEQ ID NO: 998 - DNA, 158 bp, synthetic construct
  misc_feature 1..158: note = Synthetic nucleic acid
  source 1..158: mol_type = other DNA
cagacgacggccagtgtcgacatgaataccattttttccgctcgtatcatgaagcgcctggaacacttcttgcggcgatggttcctggctcttcgatctgattacattaaattaatgttccatcactggtttggtataggatcctacggtcattcagc

SEQ ID NO: 999 - DNA, 158 bp, synthetic construct
  misc_feature 1..158: note = Synthetic nucleic acid
  source 1..158: mol_type = other DNA
cagacgacggccagtgtcgacatgatggttacagttgtcagcaattattgtcaattatctcaaacgcaactcaaacacttcttgcggcgatggttcctggctcttcgatctagagcatccggcaaaagagtgagtggatcctacggtcattcagccgc

SEQ ID NO: 1000 - DNA, 158 bp, synthetic construct
  misc_feature 1..158: note = Synthetic nucleic acid
  source 1..158: mol_type = other DNA
cagacgacggccagtgtcgacatgcaacctgggaaaagatttttagtctggctggcgggtttaacacttcttgcggcgatggttcctggctcttcgatccatggcaatgccgaagtcgctcatagcgaatcacaccacggatcctacggtcattcagc

SEQ ID NO: 1001 - DNA, 158 bp, synthetic construct
  misc_feature 1..158: note = Synthetic nucleic acid
  source 1..158: mol_type = other DNA
cagacgacggccagtgtcgacatgcttaccacccttatttatcgtagccatatacgtgacgacgaaaacacttcttgcggcgatggttcctggctcttcgatcgtatcccttccatagcgtggccagagaaaaaacggggatcctacggtcattcagc

SEQ ID NO: 1002 - DNA, 158 bp, synthetic construct
  misc_feature 1..158: note = Synthetic nucleic acid
  source 1..158: mol_type = other DNA
cagacgacggccagtgtcgacatggctaagaatattccattcaaactgattcttgaaaaagcaaaagattaccaggcaacacttcttgcggcgatggttcctggctcttcgatcttaagctggctggcaacagagttcggatcctacggtcattcagc

SEQ ID NO: 1003 - DNA, 158 bp, synthetic construct
  misc_feature 1..158: note = Synthetic nucleic acid
  source 1..158: mol_type = other DNA
cagacgacggccagtgtcgacgtgaaaaacagaaccctgggaagtgtttttatcgtggcgggaaaacacttcttgcggcgatggttcctggctcttcgatctttgattgcggcagggttgttaccagaagtggggatgggatcctacggtcattcagc

SEQ ID NO: 1004 - DNA, 158 bp, synthetic construct
  misc_feature 1..158: note = Synthetic nucleic acid
  source 1..158: mol_type = other DNA
cagacgacggccagtgtcgacatgaatgaatttccggttgttttggttattaactgtggttcgtcttcgattaaaacacttcttgcggcgatggttcctggctcttcgatcgttaacgcgcccgcagaatttgcattgggatcctacggtcattcagc

SEQ ID NO: 1005 - DNA, 158 bp, synthetic construct
  misc_feature 1..158: note = Synthetic nucleic acid
  source 1..158: mol_type = other DNA
cagacgacggccagtgtcgacatgacaccttcaaattatcagcgtacccgctggctgacactcataacacttcttgcggcgatggttcctggctcttcgatccagaaaatgttgcgtgaggcgcatggctcccttggtggatcctacggtcattcagc

SEQ ID NO: 1006 - DNA, 158 bp, synthetic construct
  misc_feature 1..158: note = Synthetic nucleic acid
  source 1..158: mol_type = other DNA
cagacgacggccagtgtcgacatgaccgtaaattcttcacgtaatgcattgaaacgccgaacctaacacttcttgcggcgatggttcctggctcttcgatccgataccaaaacgcagacggcgatggagaatagtgctggatcctacggtcattcagc

SEQ ID NO: 1007 - DNA, 158 bp, synthetic construct
  misc_feature 1..158: note = Synthetic nucleic acid
  source 1..158: mol_type = other DNA
cagacgacggccagtgtcgacatggccttttctcaagcggttagcggattaaacgctgccaacacttcttgcggcgatggttcctggctcttcgatccccaggaccagatcctcaacacgctggttaacttacgctcaggatcctacggtcattcagc

SEQ ID NO: 1008 - DNA, 158 bp, synthetic construct
  misc_feature 1..158: note = Synthetic nucleic acid
  source 1..158: mol_type = other DNA
cagacgacggccagtgtcgacatgtcccgcgtgtcgcaggcgaggaacctgggtaaatatttcctgctaacacttcttgcggcgatggttcctggctcttcgatcgccgcgcgtcgtttgcttgaacgcgacgccggtggatcctacggtcattcagc

SEQ ID NO: 1009 - DNA, 158 bp, synthetic construct
  misc_feature 1..158: note = Synthetic nucleic acid
  source 1..158: mol_type = other DNA
cagacgacggccagtgtcgacttgagcaagacaccactcacagcaaaggccatagacaacacttcttgcggcgatggttcctggctcttcgatcattcaatattggcaggtaacggcaatcctctagaaccggaagaaggatcctacggtcattcagc

SEQ ID NO: 1010 - DNA, 158 bp, synthetic construct
  misc_feature 1..158: note = Synthetic nucleic acid
  source 1..158: mol_type = other DNA
cagacgacggccagtgtcgacatgaacgtttttaatcccgcgcagtttcgcgcccagtttccaacacttcttgcggcgatggttcctggctcttcgatcaatgccgttgaccgcgcgctggaattattggtggatacaggatcctacggtcattcagc

SEQ ID NO: 1011 - DNA, 158 bp, synthetic construct
  misc_feature 1..158: note = Synthetic nucleic acid
  source 1..158: mol_type = other DNA
cagacgacggccagtgtcgacatgaccctaccaaaaattaaacaggttcgcgcctggtttactggaacacttcttgcggcgatggttcctggctcttcgatccgtgactgcaatttgaaacgcccctacagccacataggatcctacggtcattcagc

SEQ ID NO: 1012 - DNA, 158 bp, synthetic construct
  misc_feature 1..158: note = Synthetic nucleic acid
  source 1..158: mol_type = other DNA
cagacgacggccagtgtcgacatgcgtgaagcctttatttgtgacggaattcgtacgccaattggtaacacttcttgcggcgatggttcctggctcttcgatcgtcagggcatcgccatgattctggagcgtgttacgggatcctacggtcattcagc

SEQ ID NO: 1013 - DNA, 158 bp, synthetic construct
  misc_feature 1..158: note = Synthetic nucleic acid
  source 1..158: mol_type = other DNA
cagacgacggccagtgtcgacatgtcatggcagcaattcaaacacgcctggttgattaaattctgggcaacacttcttgcggcgatggttcctggctcttcgatcgcggcaccgcagactgctaaggagatcgcatacggatcctacggtcattcagc

SEQ ID NO: 1014 - DNA, 158 bp, synthetic construct
  misc_feature 1..158: note = Synthetic nucleic acid
  source 1..158: mol_type = other DNA
cagacgacggccagtgtcgacatgtttcatctcgatactttagcaacgcttgttgccgcaaaacacttcttgcggcgatggttcctggctcttcgatcaattaagttgtatttgatgttgccgatttttgccggtccaggatcctacggtcattcagc

SEQ ID NO: 1015 - DNA, 158 bp, synthetic construct
  misc_feature 1..158: note = Synthetic nucleic acid
  source 1..158: mol_type = other DNA
cagacgacggccagtgtcgacatgaaagaaaaaacgatcattattgtcggtggcgggcaaaacacttcttgcggcgatggttcctggctcttcgatcaactgctgatagatgagaacatcgcgcttaaatcactgtgcggatcctacggtcattcagc

SEQ ID NO: 1016 - DNA, 158 bp, synthetic construct
  misc_feature 1..158: note = Synthetic nucleic acid
  source 1..158: mol_type = other DNA
cagacgacggccagtgtcgacatgacacaattcgcttctcctgttctgcactcgttgctaacacttcttgcggcgatggttcctggctcttcgatccgcaaagcgttcgaccttccgcatattaaaaaagccagtaacggatcctacggtcattcagc

SEQ ID NO: 1017 - DNA, 158 bp, synthetic construct
  misc_feature 1..158: note = Synthetic nucleic acid
  source 1..158: mol_type = other DNA
cagacgacggccagtgtcgacatgacgcaatactcctctctccttcgtggtcttgcagcaacacttcttgcggcgatggttcctggctcttcgatcatgatgaaattccatcagtggttcggcagctggttctctgtgggatcctacggtcattcagc

SEQ ID NO: 1018 - DNA, 158 bp, synthetic construct
  misc_feature 1..158: note = Synthetic nucleic acid
  source 1..158: mol_type = other DNA
cagacgacggccagtgtcgacatgcaaagtgttgatgtagccattgttggcggcggcataacacttcttgcggcgatggttcctggctcttcgatccaggcaatgggattaaacgatttgcctgaatggctgcgtctaggatcctacggtcattcagc

SEQ ID NO: 1019 - DNA, 158 bp, synthetic construct
  misc_feature 1..158: note = Synthetic nucleic acid
  source 1..158: mol_type = other DNA
cagacgacggccagtgtcgacatgcgcatccttcacacctcagactggcatctcggccagaaaacacttcttgcggcgatggttcctggctcttcgatcacgacgttgcataccctcgccggagaacacgaagcacgaggatcctacggtcattcagc

SEQ ID NO: 1020 - DNA, 158 bp, synthetic construct
  misc_feature 1..158: note = Synthetic nucleic acid
  source 1..158: mol_type = other DNA
cagacgacggccagtgtcgacatggaccgcgtccttcattttgtactggcacttgccgttgttgaacacttcttgcggcgatggttcctggctcttcgatctgtgctgtctgcgtcaatcgcagcactggtgctgctaggatcctacggtcattcagc

SEQ ID NO: 1021 - DNA, 158 bp, synthetic construct
  misc_feature 1..158: note = Synthetic nucleic acid
  source 1..158: mol_type = other DNA
cagacgacggccagtgtcgacatggcgagtaagcaactctggcgctggcatggaacacttcttgcggcgatggttcctggctcttcgatctatctgccaattttccatttaggcgatgcgatgagtgggatgggacgtggatcctacggtcattcagc

SEQ ID NO: 1022 - DNA, 158 bp, synthetic construct
  misc_feature 1..158: note = Synthetic nucleic acid
  source 1..158: mol_type = other DNA
cagacgacggccagtgtcgacatgtcgagtaagttagtactggttctgaactgcggtagttcttcactgaaatttaacacttcttgcggcgatggttcctggctcttcgatcaagacgcgagccgcctgactgcctgcggatcctacggtcattcagc

SEQ ID NO: 1023 - DNA, 158 bp, synthetic construct
  misc_feature 1..158: note = Synthetic nucleic acid
  source 1..158: mol_type = other DNA
cagacgacggccagtgtcgacatgttaaaagtggaaatgttatccaccggggatgaagtgttacacgaacacttcttgcggcgatggttcctggctcttcgatctgaggttgttgagtccatgaccttatctgtcttcggatcctacggtcattcagc

SEQ ID NO: 1024 - DNA, 158 bp, synthetic construct
  misc_feature 1..158: note = Synthetic nucleic acid
  source 1..158: mol_type = other DNA
cagacgacggccagtgtcgacgtgacggcgttaaaagtaggaagtgagagctggtggcaaacacttcttgcggcgatggttcctggctcttcgatcctaatcgacctctggcaaccacttttccatgacaggagtcggggatcctacggtcattcagc

SEQ ID NO: 1025 - DNA, 158 bp, synthetic construct
  misc_feature 1..158: note = Synthetic nucleic acid
  source 1..158: mol_type = other DNA
cagacgacggccagtgtcgacgtggaaaggtttgatgccattattataggcgctggtgcggcaacacttcttgcggcgatggttcctggctcttcgatcgcttgtgcgcaggatttgattgcagcaaagtcgtccgagggatcctacggtcattcagc

SEQ ID NO: 1026 - DNA, 158 bp, synthetic construct
  misc_feature 1..158: note = Synthetic nucleic acid
  source 1..158: mol_type = other DNA
cagacgacggccagtgtcgacatgtaccaacctgtcgctctatttattggcctgcgttacatgcaacacttcttgcggcgatggttcctggctcttcgatccgccactcaacccgctgaggctttacgttatgaaggatcctacggtcattcagccgc

SEQ ID NO: 1027 - DNA, 158 bp, synthetic construct
  misc_feature 1..158: note = Synthetic nucleic acid
  source 1..158: mol_type = other DNA
cagacgacggccagtgtcgacatgaagcaactcaccattctgggctcgaccggctcgattaacacttcttgcggcgatggttcctggctcttcgatcgtgaagtcgccagaaaagaggtgatgcgtctcgcaagctgtggatcctacggtcattcagc

SEQ ID NO: 1028 - DNA, 158 bp, synthetic construct
  misc_feature 1..158: note = Synthetic nucleic acid
  source 1..158: mol_type = other DNA
cagacgacggccagtgtcgacatgaattatcgctatcgcgccatgacccaggatggtaacacttcttgcggcgatggttcctggctcttcgatccggtactccaacctcttcttcaacttaactcaatgattaataagggatcctacggtcattcagc

SEQ ID NO: 1029 - DNA, 158 bp, synthetic construct
  misc_feature 1..158: note = Synthetic nucleic acid
  source 1..158: mol_type = other DNA
cagacgacggccagtgtcgacatgcgtggagaattttatcagcagttaaccaacgatctggaaaccaacacttcttgcggcgatggttcctggctcttcgatccgcgtattggtaaacaactgggcgttatcgccggaggatcctacggtcattcagc

SEQ ID NO: 1030 - DNA, 158 bp, synthetic construct
  misc_feature 1..158: note = Synthetic nucleic acid
  source 1..158: mol_type = other DNA
cagacgacggccagtgtcgacatgctaaaagtgttattgctctttgtgttgctgattgcgggaacacttcttgcggcgatggttcctggctcttcgatcggtttgatgttaacgttgcagaataacccgccacagaacggatcctacggtcattcagc

SEQ ID NO: 1031 - DNA, 158 bp, synthetic construct
  misc_feature 1..158: note = Synthetic nucleic acid
  source 1..158: mol_type = other DNA
cagacgacggccagtgtcgacatgtccgttttctcattgaagattgatatcgccgataacaaatttttcaacggaacacttcttgcggcgatggttcctggctcttcgatcgaaggcaaacacgctgtagcacctctaggatcctacggtcattcagc

SEQ ID NO: 1032 - DNA, 158 bp, synthetic construct
  misc_feature 1..158: note = Synthetic nucleic acid
  source 1..158: mol_type = other DNA
cagacgacggccagtgtcgacatgaacaaaaacagagggtttacgcctctggcggtcgttctgataacacttcttgcggcgatggttcctggctcttcgatcgcaagcggtgctcagcctgaacagtccaagtctggcggatcctacggtcattcagc

SEQ ID NO: 1033 - DNA, 158 bp, synthetic construct
  misc_feature 1..158: note = Synthetic nucleic acid
  source 1..158: mol_type = other DNA
cagacgacggccagtgtcgacatgacaacattacttaacccctattttggtgagtttggcggcataacacttcttgcggcgatggttcctggctcttcgatcgttcacgatattttgaaagcacgaggggaaatccttggatcctacggtcattcagc

SEQ ID NO: 1034 - DNA, 158 bp, synthetic construct
  misc_feature 1..158: note = Synthetic nucleic acid
  source 1..158: mol_type = other DNA
cagacgacggccagtgtcgacatgagagcctgcattaataatcaacagattcgccaccataacaaatgcaacacttcttgcggcgatggttcctggctcttcgatctgtatgttgaggcgcagttacgacagatttcaggatcctacggtcattcagc

SEQ ID NO: 1035 - DNA, 158 bp, synthetic construct
  misc_feature 1..158: note = Synthetic nucleic acid
  source 1..158: mol_type = other DNA
cagacgacggccagtgtcgacatgagtgagtcagtgcacactaacacttcgttgtggtcgaaggggatgaaaaacacttcttgcggcgatggttcctggctcttcgatccgctgtggatctggcagcgccgtcatagtggatcctacggtcattcagc

SEQ ID NO: 1036 - DNA, 158 bp, synthetic construct
  misc_feature 1..158: note = Synthetic nucleic acid
  source 1..158: mol_type = other DNA
cagacgacggccagtgtcgacgtgtttcaaaaagttgacgcctacgctggcgacccgattcttacaacacttcttgcggcgatggttcctggctcttcgatccaacgtgtggcaaaggcgtttgctgcggtgatgggcggatcctacggtcattcagc

SEQ ID NO: 1037 - DNA, 158 bp, synthetic construct
  misc_feature 1..158: note = Synthetic nucleic acid
  source 1..158: mol_type = other DNA
cagacgacggccagtgtcgacatgaaaataaaaacaggtgcacgcatcctcgcattatccgcattaaaacacttcttgcggcgatggttcctggctcttcgatccctgaaagacgcgcagactcgtatcaccaagaatggatcctacggtcattcagc

SEQ ID NO: 1038 - DNA, 158 bp, synthetic construct
  misc_feature 1..158: note = Synthetic nucleic acid
  source 1..158: mol_type = other DNA
cagacgacggccagtgtcgacatgaatgacaccagcttcgaaaactgcattaagtgcaccgtctgcaccaaacacttcttgcggcgatggttcctggctcttcgatcgattacgctactggcccaggcgctggctgatggatcctacggtcattcagc

SEQ ID NO: 1039 - DNA, 158 bp, synthetic construct
  misc_feature 1..158: note = Synthetic nucleic acid
  source 1..158: mol_type = other DNA
cagacgacggccagtgtcgacatgacaacaaacactgtttcccgcaaagtggcgtggctacggaacacttcttgcggcgatggttcctggctcttcgatcgccgctggccagtgacactcgaagaacagacgcaaaatggatcctacggtcattcagc

SEQ ID NO: 1040 - DNA, 158 bp, synthetic construct
  misc_feature 1..158: note = Synthetic nucleic acid
  source 1..158: mol_type = other DNA
cagacgacggccagtgtcgacatgagtgaatttattgccgaaaaccgcggcgcaacacttcttgcggcgatggttcctggctcttcgatcctgactgcattgttggttactgcaaaggtgaaaatgaagaaatccaccggatcctacggtcattcagc

SEQ ID NO: 1041 - DNA, 158 bp, synthetic construct
  misc_feature 1..158: note = Synthetic nucleic acid
  source 1..158: mol_type = other DNA
cagacgacggccagtgtcgacatgagtgtacgtttagtgttagccaaagggcgcgaaaaatcattaaacacttcttgcggcgatggttcctggctcttcgatctatatctgaaagggtttgcctgtcgcgtcatgggaggatcctacggtcattcagc

SEQ ID NO: 1042 - DNA, 158 bp, synthetic construct
  misc_feature 1..158: note = Synthetic nucleic acid
  source 1..158: mol_type = other DNA
cagacgacggccagtgtcgacatgatgaaaactgttaatgagctgattaaggatatcaattcgctgacctctcaaacacttcttgcggcgatggttcctggctcttcgatcaaagaagcgcaagaacgcgtgaaatacggatcctacggtcattcagc

SEQ ID NO: 1043 - DNA, 158 bp, synthetic construct
  misc_feature 1..158: note = Synthetic nucleic acid
  source 1..158: mol_type = other DNA
cagacgacggccagtgtcgacatgattatttccgcagccagcgattatcgcgccgcagcgcaacaacacttcttgcggcgatggttcctggctcttcgatcggcactggctcccatggcgaaagggaatgcggcatgcggatcctacggtcattcagc

SEQ ID NO: 1044 - DNA, 158 bp, synthetic construct
  misc_feature 1..158: note = Synthetic nucleic acid
  source 1..158: mol_type = other DNA
cagacgacggccagtgtcgacatgcttgacgctcaaaccatcgctacagtaaaagccaccataacacttcttgcggcgatggttcctggctcttcgatcattcattacgaatgctttggcccgcataaggtgctgattggatcctacggtcattcagc

SEQ ID NO: 1045 - DNA, 158 bp, synthetic construct
  misc_feature 1..158: note = Synthetic nucleic acid
  source 1..158: mol_type = other DNA
cagacgacggccagtgtcgacatgtttgagaacattaccgccgctcctgccgacccgattctgggaacacttcttgcggcgatggttcctggctcttcgatcgctccgctgtgcgaagcgattgtggcagtgctggggggatcctacggtcattcagc

SEQ ID NO: 1046 - DNA, 158 bp, synthetic construct
  misc_feature 1..158: note = Synthetic nucleic acid
  source 1..158: mol_type = other DNA
cagacgacggccagtgtcgacgtgaccacccgacagcattcgtcgtttgctattgtttttatccttaacacttcttgcggcgatggttcctggctcttcgatctctgtctgtacgccagtcggccgaaaaaacggaccggatcctacggtcattcagc

SEQ ID NO: 1047 - DNA, 158 bp, synthetic construct
  misc_feature 1..158: note = Synthetic nucleic acid
  source 1..158: mol_type = other DNA
cagacgacggccagtgtcgacatgaacttatccctacgacgctctaccagcgcccttcttgcctcgtcgttaacacttcttgcggcgatggttcctggctcttcgatcagaccgtgggggcagcccgcgctttgtagcggatcctacggtcattcagc

SEQ ID NO: 1048 - DNA, 158 bp, synthetic construct
  misc_feature 1..158: note = Synthetic nucleic acid
  source 1..158: mol_type = other DNA
cagacgacggccagtgtcgacatgcaaaatgaattgcagaccgcgctctttcaggcgttcgataccctaacacttcttgcggcgatggttcctggctcttcgatccagattgtcggcctgtacgcagcggcgcaatacggatcctacggtcattcagc

SEQ ID NO: 1049 - DNA, 158 bp, synthetic construct
  misc_feature 1..158: note = Synthetic nucleic acid
  source 1..158: mol_type = other DNA
cagacgacggccagtgtcgacatggcggacaaaaagcttgatactcaactggtgaatgcaggacgcaaacacttcttgcggcgatggttcctggctcttcgatccgatctggacgccggttttgcgcgaattgtatggggatcctacggtcattcagc

SEQ ID NO: 1050 - DNA, 158 bp, synthetic construct
  misc_feature 1..158: note = Synthetic nucleic acid
  source 1..158: mol_type = other DNA
cagacgacggccagtgtcgacatgaaaaaagtcattttatctttggctctgggcacgtttggtttggggatgaacacttcttgcggcgatggttcctggctcttcgatcctccggtgctggcgaaaccactggggaaaggatcctacggtcattcagc

SEQ ID NO: 1051 - DNA, 158 bp, synthetic construct
  misc_feature 1..158: note = Synthetic nucleic acid
  source 1..158: mol_type = other DNA
cagacgacggccagtgtcgacatgaaaaattgtgtcatcgtcagtgcggtacgtactgctatcaacacttcttgcggcgatggttcctggctcttcgatcgtcagggaattgcgatggtgattgaacggttgaatgacggatcctacggtcattcagc

SEQ ID NO: 1052 - DNA, 158 bp, synthetic construct
  misc_feature 1..158: note = Synthetic nucleic acid
  source 1..158: mol_type = other DNA
cagacgacggccagtgtcgacatgaaaaggcaaagaaacgtcaatttgttattgatgttggtattactcgtggcaacacttcttgcggcgatggttcctggctcttcgatcatgtcgcatcaggggcagcccgttccgggatcctacggtcattcagc

SEQ ID NO: 1053 - DNA, 158 bp, synthetic construct
  misc_feature 1..158: note = Synthetic nucleic acid
  source 1..158: mol_type = other DNA
cagacgacggccagtgtcgacatggaacagacctggcgctggtacggcccaaacgatccgaacacttcttgcggcgatggttcctggctcttcgatcgtgtcgaactggcgatccagcgcgctttctttagccgtactggatcctacggtcattcagc

SEQ ID NO: 1054 - DNA, 158 bp, synthetic construct
  misc_feature 1..158: note = Synthetic nucleic acid
  source 1..158: mol_type = other DNA
cagacgacggccagtgtcgacatgtctaaagaaaagtttgaacgtacaaaaccgcacgttaacgtcggtaaacacttcttgcggcgatggttcctggctcttcgatccgcgggcgttgtagcaaaagttctgagcctgggatcctacggtcattcagc

SEQ ID NO: 1055 - DNA, 158 bp, synthetic construct
  misc_feature 1..158: note = Synthetic nucleic acid
  source 1..158: mol_type = other DNA
cagacgacggccagtgtcgacgtgtctaaagaaaaatttgaacgtacaaaaccgcacgttaacgttggtactataacacttcttgcggcgatggttcctggctcttcgatcggcgttgttgctaaagttctgggccctggatcctacggtcattcagc

SEQ ID NO: 1056 - DNA, 158 bp, synthetic construct
  misc_feature 1..158: note = Synthetic nucleic acid
  source 1..158: mol_type = other DNA
cagacgacggccagtgtcgacatgaaagacgttgtgattgtcggggcgttacggacacctatcaacacttcttgcggcgatggttcctggctcttcgatcgccagggtgtggcattgaccattgaacgtgacgaacgtggatcctacggtcattcagc

SEQ ID NO: 1057 - DNA, 158 bp, synthetic construct
  misc_feature 1..158: note = Synthetic nucleic acid
  source 1..158: mol_type = other DNA
cagacgacggccagtgtcgacatgacctgttcaacttcattaagcggcaaaaacaggattgtccttataacacttcttgcggcgatggttcctggctcttcgatcctttgcgccgggagagacaaagaaattcgccatggatcctacggtcattcagc

SEQ ID NO: 1058 - DNA, 158 bp, synthetic construct
  misc_feature 1..158: note = Synthetic nucleic acid
  source 1..158: mol_type = other DNA
cagacgacggccagtgtcgacatgacggaacaagaaaaaacctccgccgtggttgaagagaccagggaaacacttcttgcggcgatggttcctggctcttcgatcgatactccggcagccgcgccgcaaggagaattaggatcctacggtcattcagc

SEQ ID NO: 1059 - DNA, 158 bp, synthetic construct
  misc_feature 1..158: note = Synthetic nucleic acid
  source 1..158: mol_type = other DNA
cagacgacggccagtgtcgacatgactaacagcaatcgcatcaagctcacatggattagctttctaacacttcttgcggcgatggttcctggctcttcgatccgtcaccgtcagcataacaccctgacctctcatgagggatcctacggtcattcagc

SEQ ID NO: 1060 - DNA, 158 bp, synthetic construct
  misc_feature 1..158: note = Synthetic nucleic acid
  source 1..158: mol_type = other DNA
cagacgacggccagtgtcgacatgcataactcccccgcagtctccagcgcgaaataacacttcttgcggcgatggttcctggctcttcgatcgattatcgccactctgttttgcttactgcggattaaagatgttgttggatcctacggtcattcagc

SEQ ID NO: 1061 - DNA, 158 bp, synthetic construct
  misc_feature 1..158: note = Synthetic nucleic acid
  source 1..158: mol_type = other DNA
cagacgacggccagtgtcgacatgtcgaaaagcaatccgtctgaagtgaaattggccgtaccgaaacacttcttgcggcgatggttcctggctcttcgatcagtatggatggactccgcaaccaaacgccgttctaccggatcctacggtcattcagc

SEQ ID NO: 1062 - DNA, 158 bp, synthetic construct
  misc_feature 1..158: note = Synthetic nucleic acid
  source 1..158: mol_type = other DNA
cagacgacggccagtgtcgacatgtctcatcgccgctcaaccgttaaaggctcactctaacacttcttgcggcgatggttcctggctcttcgatcgatgaatatctataaccgccgcatcgcgatcgttgaacgcgtcggatcctacggtcattcagc

SEQ ID NO: 1063 - DNA, 158 bp, synthetic construct
  misc_feature 1..158: note = Synthetic nucleic acid
  source 1..158: mol_type = other DNA
cagacgacggccagtgtcgacatgacgttattaggcactgcgctgcgtccggcagcaactcgaacacttcttgcggcgatggttcctggctcttcgatcgcgaagcacgccgccggacaggtaaaagtacagggtagaggatcctacggtcattcagc

SEQ ID NO: 1064 - DNA, 158 bp, synthetic construct
  misc_feature 1..158: note = Synthetic nucleic acid
  source 1..158: mol_type = other DNA
cagacgacggccagtgtcgacatgactgctgtaagccaaaccgaaacacgatcttctgcaacacttcttgcggcgatggttcctggctcttcgatcctgggtattattgtcacgatactgtcatttcgtcggggtgccggatcctacggtcattcagc

SEQ ID NO: 1065 - DNA, 158 bp, synthetic construct
  misc_feature 1..158: note = Synthetic nucleic acid
  source 1..158: mol_type = other DNA
cagacgacggccagtgtcgacatgagcgtaatcatcgtcggtggcggcatggcgggcgcgacgctaacacttcttgcggcgatggttcctggctcttcgatcctggcgcagcgcaccctcggttgggtggcgcgttctggatcctacggtcattcagc

SEQ ID NO: 1066 - DNA, 158 bp, synthetic construct
  misc_feature 1..158: note = Synthetic nucleic acid
  source 1..158: mol_type = other DNA
cagacgacggccagtgtcgacatgagtcatgatccacaaccgctgggcggcaaaataacacttcttgcggcgatggttcctggctcttcgatcttaaaacaaaacgatcataatcgtcatgaggcgagcaaagcaagtggatcctacggtcattcagc

SEQ ID NO: 1067 - DNA, 158 bp, synthetic construct
  misc_feature 1..158: note = Synthetic nucleic acid
  source 1..158: mol_type = other DNA
cagacgacggccagtgtcgacatgatctggataatgacgatggctcgccgtatgaacgaacacttcttgcggcgatggttcctggctcttcgatctgttgtcgcattatttttaaccgcaaaggttaaagacgttaagggatcctacggtcattcagc

SEQ ID NO: 1068 - DNA, 158 bp, synthetic construct
  misc_feature 1..158: note = Synthetic nucleic acid
  source 1..158: mol_type = other DNA
cagacgacggccagtgtcgacatgcaattgcgtaaattactgctgccaggactgctttccaacacttcttgcggcgatggttcctggctcttcgatctccaggcaaaagacggaaccgtgtactctattacacgtcctggatcctacggtcattcagc

SEQ ID NO: 1069 - DNA, 158 bp, synthetic construct
  misc_feature 1..158: note = Synthetic nucleic acid
  source 1..158: mol_type = other DNA
cagacgacggccagtgtcgacatgccttcgtccacgcatcccgtagaacgcttttaacacttcttgcggcgatggttcctggctcttcgatctatcagcacagtgcaattatttaagctacaagtggtcacttcatcaggatcctacggtcattcagc

SEQ ID NO: 1070 - DNA, 158 bp, synthetic construct
  misc_feature 1..158: note = Synthetic nucleic acid
  source 1..158: mol_type = other DNA
cagacgacggccagtgtcgacatgtttactaaacgtcaccgcatcacattactgttcaatgccaataaagcaacacttcttgcggcgatggttcctggctcttcgatccgcgatgtaaatagcgaggtcatgttggacggatcctacggtcattcagc

SEQ ID NO: 1071 - DNA, 158 bp, synthetic construct
  misc_feature 1..158: note = Synthetic nucleic acid
  source 1..158: mol_type = other DNA
cagacgacggccagtgtcgacatgacaaatcaaccaacggaaattgccattgtcggcggaaacacttcttgcggcgatggttcctggctcttcgatctgttgaaacgtcaggcgctgaaatatgcgttagggttggatggatcctacggtcattcagc

SEQ ID NO: 1072 - DNA, 158 bp, synthetic construct
  misc_feature 1..158: note = Synthetic nucleic acid
  source 1..158: mol_type = other DNA
cagacgacggccagtgtcgacatgcaaaaactcattaactcagtgcaaaactatgcctggggcagcaaaaaacacttcttgcggcgatggttcctggctcttcgatcccgtttagcgcgtgtttacaacaagctgtcaggatcctacggtcattcagc

SEQ ID NO: 1073 - DNA, 158 bp, synthetic construct
  misc_feature 1..158: note = Synthetic nucleic acid
  source 1..158: mol_type = other DNA
cagacgacggccagtgtcgacatgcgtctgttttctattcctccacccacgctactaacacttcttgcggcgatggttcctggctcttcgatctgttacgtggtgttgaatttaatcgctgacagaaaccgatatgaaggatcctacggtcattcagc

SEQ ID NO: 1074 - DNA, 158 bp, synthetic construct
  misc_feature 1..158: note = Synthetic nucleic acid
  source 1..158: mol_type = other DNA
cagacgacggccagtgtcgacatggatacgtcactggctgaggaagtacagcagaccataacacttcttgcggcgatggttcctggctcttcgatcgtcaaactttctaccatgttgaacgtttttggattgcataccggatcctacggtcattcagc

SEQ ID NO: 1075 - DNA, 158 bp, synthetic construct
  misc_feature 1..158: note = Synthetic nucleic acid
  source 1..158: mol_type = other DNA
cagacgacggccagtgtcgacatgtcccgctttttgatttgtagttttgccctggttttactttatccaacacttcttgcggcgatggttcctggctcttcgatcgccgctcatgaagaaatccatcaccacgctacaggatcctacggtcattcagc

SEQ ID NO: 1076 - DNA, 158 bp, synthetic construct
  misc_feature 1..158: note = Synthetic nucleic acid
  source 1..158: mol_type = other DNA
cagacgacggccagtgtcgacatgaagtttgttgatgaagcatcgattctggtcgttgcaggtaacacttcttgcggcgatggttcctggctcttcgatcacgacgaagaaggcgttgagttcatttacaagcgttatggatcctacggtcattcagc

SEQ ID NO: 1077 - DNA, 158 bp, synthetic construct
  misc_feature 1..158: note = Synthetic nucleic acid
  source 1..158: mol_type = other DNA
cagacgacggccagtgtcgacatgagcgcaaatgcggagactcaaaccccgcaaacacttcttgcggcgatggttcctggctcttcgatccctgtcaataaactgatcgacgatatcgtaaaagctaacgctggccaaggatcctacggtcattcagc

SEQ ID NO: 1078 - DNA, 158 bp, synthetic construct
  misc_feature 1..158: note = Synthetic nucleic acid
  source 1..158: mol_type = other DNA
cagacgacggccagtgtcgacatgattgattataccgcagccggttttaccctgctgcagggaaacacttcttgcggcgatggttcctggctcttcgatcgcaaagcctgcgtgaaaggaacgtttgaaacggctaagggatcctacggtcattcagc

SEQ ID NO: 1079 - DNA, 158 bp, synthetic construct
  misc_feature 1..158: note = Synthetic nucleic acid
  source 1..158: mol_type = other DNA
cagacgacggccagtgtcgacatgcggaaactctggaacgcgctacgccgaccaacacttcttgcggcgatggttcctggctcttcgatctctgacaccgcaggtaaggctcacggcgataagaaggaagaaaaatgcggatcctacggtcattcagc

SEQ ID NO: 1080 - DNA, 158 bp, synthetic construct
  misc_feature 1..158: note = Synthetic nucleic acid
  source 1..158: mol_type = other DNA
cagacgacggccagtgtcgacatgttcgatttttcaaaggtcgtggatcgtcatggcacatggtaacacttcttgcggcgatggttcctggctcttcgatcggctggattaattaacgccatccgcgctgttcgttggggatcctacggtcattcagc

SEQ ID NO: 1081 - DNA, 158 bp, synthetic construct
  misc_feature 1..158: note = Synthetic nucleic acid
  source 1..158: mol_type = other DNA
cagacgacggccagtgtcgacatgaaaattaactatccgttgctggcgctggcgattggaacacttcttgcggcgatggttcctggctcttcgatcgccagaaaacaacctgaaacagtttgcgttgctaacagcgcgggatcctacggtcattcagc

SEQ ID NO: 1082 - DNA, 158 bp, synthetic construct
  misc_feature 1..158: note = Synthetic nucleic acid
  source 1..158: mol_type = other DNA
cagacgacggccagtgtcgacatgaatataaaaattgctgctttaacgctggctattgccagcgaacacttcttgcggcgatggttcctggctcttcgatcagcctatgcagcctttgtacagaaattatttaaacatggatcctacggtcattcagc

SEQ ID NO: 1083 - DNA, 158 bp, synthetic construct
  misc_feature 1..158: note = Synthetic nucleic acid
  source 1..158: mol_type = other DNA
cagacgacggccagtgtcgacatgagcgacacaacgatcctgcaaaacagtacccatgtcattaaaccgaaaaaataacacttcttgcggcgatggttcctggctcttcgatctgtcgcgctggataagcgccagggatcctacggtcattcagccgc

SEQ ID NO: 1084 - DNA, 158 bp, synthetic construct
  misc_feature 1..158: note = Synthetic nucleic acid
  source 1..158: mol_type = other DNA
cagacgacggccagtgtcgacatgctggagttgttgtttctgcttttgcctgtagccgctaacacttcttgcggcgatggttcctggctcttcgatcggtcaaccattaaaccgattcgcggtcttgatggcctgtccggatcctacggtcattcagc

SEQ ID NO: 1085 - DNA, 158 bp, synthetic construct
  misc_feature 1..158: note = Synthetic nucleic acid
  source 1..158: mol_type = other DNA
cagacgacggccagtgtcgacatgaaaatcaccatttccggtactggctatgtaggcttgtcaaacgaacacttcttgcggcgatggttcctggctcttcgatcggtatacacccgcgatctctttggcagcgacacaggatcctacggtcattcagc

SEQ ID NO: 1086 - DNA, 158 bp, synthetic construct
  misc_feature 1..158: note = Synthetic nucleic acid
  source 1..158: mol_type = other DNA
cagacgacggccagtgtcgacatgaacttacatgaatatcaggcaaaacaactttttgcccgctatggcttaaacacttcttgcggcgatggttcctggctcttcgatcaggttgttgccgcagtggaggggaaatatggatcctacggtcattcagc

SEQ ID NO: 1087 - DNA, 158 bp, synthetic construct
  misc_feature 1..158: note = Synthetic nucleic acid
  source 1..158: mol_type = other DNA
cagacgacggccagtgtcgacatgatcaagattggcgttatcgccgatgattttaccggcgcgacggatataacacttcttgcggcgatggttcctggctcttcgatcccaaccatttccccggcgtgccgtggggggggatcctacggtcattcagc

SEQ ID NO: 1088 - DNA, 158 bp, synthetic construct
  misc_feature 1..158: note = Synthetic nucleic acid
  source 1..158: mol_type = other DNA
cagacgacggccagtgtcgacatgcgccattgtgggtggttgctgggattgttatcgctaacacttcttgcggcgatggttcctggctcttcgatcgcgctggaacaagaatggctacaccgttacggtacgcatctaggatcctacggtcattcagc

SEQ ID NO: 1089 - DNA, 158 bp, synthetic construct
  misc_feature 1..158: note = Synthetic nucleic acid
  source 1..158: mol_type = other DNA
cagacgacggccagtgtcgacgtgaaacatctgcatcgattctttagcagtgatgcctcgggagaacacttcttgcggcgatggttcctggctcttcgatccagctggttacgcgttcgtttgcgtccatcagttaggggatcctacggtcattcagc

SEQ ID NO: 1090 - DNA, 158 bp, synthetic construct
  misc_feature 1..158: note = Synthetic nucleic acid
  source 1..158: mol_type = other DNA
cagacgacggccagtgtcgacatgaacaactttaatctgcacaccccaacccgcattctgtttggtaaaggaacacttcttgcggcgatggttcctggctcttcgatcagccgccgtatatacgaagccgcccgcccaggatcctacggtcattcagc

SEQ ID NO: 1091 - DNA, 158 bp, synthetic construct
  misc_feature 1..158: note = Synthetic nucleic acid
  source 1..158: mol_type = other DNA
cagacgacggccagtgtcgacatgcctgaatcgttgatggtcatacgttcttcctcgacgaacacttcttgcggcgatggttcctggctcttcgatccggtcagtggtgtatggacagtaaggaactcagggaaacctggatcctacggtcattcagc

SEQ ID NO: 1092 - DNA, 158 bp, synthetic construct
  misc_feature 1..158: note = Synthetic nucleic acid
  source 1..158: mol_type = other DNA
cagacgacggccagtgtcgacatgctgagacacaacgttcctgtgcgacgggatctgaacacttcttgcggcgatggttcctggctcttcgatcccaaagacacctcacgtttcgttccgcattacattgctggacagggatcctacggtcattcagc

SEQ ID NO: 1093 - DNA, 158 bp, synthetic construct
  misc_feature 1..158: note = Synthetic nucleic acid
  source 1..158: mol_type = other DNA
cagacgacggccagtgtcgacatggaacaggttgtcattgtcgatgcaattcgcaccccgatggaacacttcttgcggcgatggttcctggctcttcgatcgggtcagggtattgcgacggtgtttgagcgggttcaaggatcctacggtcattcagc

SEQ ID NO: 1094 - DNA, 158 bp, synthetic construct
  misc_feature 1..158: note = Synthetic nucleic acid
  source 1..158: mol_type = other DNA
cagacgacggccagtgtcgacatgtcactcttccgcagaaatgaaatatggtatgcctcgtattcgaacacttcttgcggcgatggttcctggctcttcgatcactctgaaattatggaggatataaagaaggcgctcggatcctacggtcattcagc

SEQ ID NO: 1095 - DNA, 158 bp, synthetic construct
  misc_feature 1..158: note = Synthetic nucleic acid
  source 1..158: mol_type = other DNA
cagacgacggccagtgtcgacatgtttgtagaagcattgaaacgccagaacccggcgctaacacttcttgcggcgatggttcctggctcttcgatcgtcggtcgttatgacagtcttggaaactctctgggggcgttcggatcctacggtcattcagc

SEQ ID NO: 1096 - DNA, 158 bp, synthetic construct
  misc_feature 1..158: note = Synthetic nucleic acid
  source 1..158: mol_type = other DNA
cagacgacggccagtgtcgacatgacaaataaccctctgattccacaaagcaaacttccacaacttggcaccaaacacttcttgcggcgatggttcctggctcttcgatcagcagctgaacgcctgcgccagcttgacggatcctacggtcattcagc

SEQ ID NO: 1097 - DNA, 158 bp, synthetic construct
  misc_feature 1..158: note = Synthetic nucleic acid
  source 1..158: mol_type = other DNA
cagacgacggccagtgtcgacatgacatcggaaaacccgttactggcgctgcgagaaacacttcttgcggcgatggttcctggctcttcgatcggctgttacccaagtgagaacgtagtgcctgttgatccaaccgaaggatcctacggtcattcagc

SEQ ID NO: 1098 - DNA, 158 bp, synthetic construct
  misc_feature 1..158: note = Synthetic nucleic acid
  source 1..158: mol_type = other DNA
cagacgacggccagtgtcgacatgacgcgtaaacaggccaccatcgcagtgcgtagcgggttaaataacacttcttgcggcgatggttcctggctcttcgatctggaaaatggcttccgggctgcaaacaaggggggcggatcctacggtcattcagc

SEQ ID NO: 1099 - DNA, 158 bp, synthetic construct
  misc_feature 1..158: note = Synthetic nucleic acid
  source 1..158: mol_type = other DNA
cagacgacggccagtgtcgacatggaaagagtcagtattaccgagcgcccggaaacacttcttgcggcgatggttcctggctcttcgatcatcacccaggatatgtctcggttttatccacatatttttgttgaattaggatcctacggtcattcagc

SEQ ID NO: 1100 - DNA, 158 bp, synthetic construct
  misc_feature 1..158: note = Synthetic nucleic acid
  source 1..158: mol_type = other DNA
cagacgacggccagtgtcgacatgaacagaagaagaaagctgttaataccgttgttattctgcggcgaacacttcttgcggcgatggttcctggctcttcgatcccaggaaaacgccagcaccgaatcgaaacaatgtggatcctacggtcattcagc

SEQ ID NO: 1101 - DNA, 158 bp, synthetic construct
  misc_feature 1..158: note = Synthetic nucleic acid
  source 1..158: mol_type = other DNA
cagacgacggccagtgtcgacatgaacccagtacccgcgcaacgtgaatatttcctcgactaacacttcttgcggcgatggttcctggctcttcgatcggttgttaagcgtgagaacgataaagcaccagcccgtacaggatcctacggtcattcagc

SEQ ID NO: 1102 - DNA, 158 bp, synthetic construct
  misc_feature 1..158: note = Synthetic nucleic acid
  source 1..158: mol_type = other DNA
cagacgacggccagtgtcgacatgacgaaacatgccaggtttttcctcctgccctcctttattaacacttcttgcggcgatggttcctggctcttcgatcccactaccgatacccccgcagatactgcatcgaagaatggatcctacggtcattcagc

SEQ ID NO: 1103 - DNA, 158 bp, synthetic construct
  misc_feature 1..158: note = Synthetic nucleic acid
  source 1..158: mol_type = other DNA
cagacgacggccagtgtcgacatgcacgttacagccaagccctccagttttcaataacacttcttgcggcgatggttcctggctcttcgatcgctttaccacattatggatgttgcaaaacaaatggagaataatggtggatcctacggtcattcagc

SEQ ID NO: 1104 - DNA, 158 bp, synthetic construct
  misc_feature 1..158: note = Synthetic nucleic acid
  source 1..158: mol_type = other DNA
cagacgacggccagtgtcgacatgctcaccgttaagcagattgaagcagcaaagccgaaagaaaaacaacacttcttgcggcgatggttcctggctcttcgatcgtgggcggactggcttgatgagaaggtggaggccggatcctacggtcattcagc

SEQ ID NO: 1105 - DNA, 158 bp, synthetic construct
  misc_feature 1..158: note = Synthetic nucleic acid
  source 1..158: mol_type = other DNA
cagacgacggccagtgtcgacatggagcgcaacgtcacgctcgattttgttcgcgaacacttcttgcggcgatggttcctggctcttcgatcaactttgcgtgctgccggaccggcaatatctaaaacatcaagagtgggatcctacggtcattcagc

SEQ ID NO: 1106 - DNA, 158 bp, synthetic construct
  misc_feature 1..158: note = Synthetic nucleic acid
  source 1..158: mol_type = other DNA
cagacgacggccagtgtcgacgtgacttatttccgtattaatcctgttctggcgctgctgctaacacttcttgcggcgatggttcctggctcttcgatcttgcttatcgcactgctgaaggtgaaacgtaatgatagtggatcctacggtcattcagc

SEQ ID NO: 1107 - DNA, 158 bp, synthetic construct
  misc_feature 1..158: note = Synthetic nucleic acid
  source 1..158: mol_type = other DNA
cagacgacggccagtgtcgacttgaaacgtagtctgcttttttctgccgtgctgtgtgcggaacacttcttgcggcgatggttcctggctcttcgatcgctaagcgggaataaaccgttggttatccccgcgtcccggggatcctacggtcattcagc

SEQ ID NO: 1108 - DNA, 158 bp, synthetic construct
  misc_feature 1..158: note = Synthetic nucleic acid
  source 1..158: mol_type = other DNA
cagacgacggccagtgtcgacatgagctggcaggagaaaatcaacgcggcgctcgatgcaacacttcttgcggcgatggttcctggctcttcgatcgatatcgaccgtctgctggaggtgctgcatggcaacggtccaggatcctacggtcattcagc

SEQ ID NO: 1109 - DNA, 158 bp, synthetic construct
  misc_feature 1..158: note = Synthetic nucleic acid
  source 1..158: mol_type = other DNA
cagacgacggccagtgtcgacatgccagaaaattacacccctgctgccgccgcaaccggtaaacacttcttgcggcgatggttcctggctcttcgatccgtggtgcaaggcgtaatcattcatccgtggcaggcatcgggatcctacggtcattcagc

SEQ ID NO: 1110 - DNA, 158 bp, synthetic construct
  misc_feature 1..158: note = Synthetic nucleic acid
  source 1..158: mol_type = other DNA
cagacgacggccagtgtcgacatgctgctggtactggtgctgattggtcttaatatgcgaccaaacacttcttgcggcgatggttcctggctcttcgatccagtacgttttccgcagctgtgggtcaaagaggcatcgggatcctacggtcattcagc

SEQ ID NO: 1111 - DNA, 158 bp, synthetic construct
  misc_feature 1..158: note = Synthetic nucleic acid
  source 1..158: mol_type = other DNA
cagacgacggccagtgtcgacatggagtcgcttatgccctgggatgcgagagataaacacttcttgcggcgatggttcctggctcttcgatcgatcgacctgaagaaaaagtcgatcaccatgggtaaaggatgtctaggatcctacggtcattcagc

SEQ ID NO: 1112 - DNA, 158 bp, synthetic construct
  misc_feature 1..158: note = Synthetic nucleic acid
  source 1..158: mol_type = other DNA
cagacgacggccagtgtcgacatggcaaaacacctttttacgtccgagtccgtctctgaagggcatcctaacacttcttgcggcgatggttcctggctcttcgatcagctgctgcgcgatgctgccggtctgaagattggatcctacggtcattcagc

SEQ ID NO: 1113 - DNA, 158 bp, synthetic construct
  misc_feature 1..158: note = Synthetic nucleic acid
  source 1..158: mol_type = other DNA
cagacgacggccagtgtcgacatgtctgaacaattagtcacacctgaaaacgtcaccacgaaagataacacttcttgcggcgatggttcctggctcttcgatctgcagggtgaagccatcgacattaaagcggtcggtggatcctacggtcattcagc

SEQ ID NO: 1114 - DNA, 158 bp, synthetic construct
  misc_feature 1..158: note = Synthetic nucleic acid
  source 1..158: mol_type = other DNA
cagacgacggccagtgtcgacatgaaaaacaaattaccgccatttatcgagatttaccgcgctctaacacttcttgcggcgatggttcctggctcttcgatcataacccaggtaattcaccatttttgctggcatccaggatcctacggtcattcagc

SEQ ID NO: 1115 - DNA, 158 bp, synthetic construct
  misc_feature 1..158: note = Synthetic nucleic acid
  source 1..158: mol_type = other DNA
cagacgacggccagtgtcgacatgagacgaacatttacagcagaggaaaaagcctctgtttttgaactataacacttcttgcggcgatggttcctggctcttcgatcaattgaaaggggtgttgcattgacagatagcggatcctacggtcattcagc

SEQ ID NO: 1116 - DNA, 158 bp, synthetic construct
  misc_feature 1..158: note = Synthetic nucleic acid
  source 1..158: mol_type = other DNA
cagacgacggccagtgtcgacatgagacgaacatttacagcagaggaaaaagcctctgtttttgaactataacacttcttgcggcgatggttcctggctcttcgatcaattgaaaggggtgttgcattgacagatacgggatcctacggtcattcagc

SEQ ID NO: 1117 - DNA, 158 bp, synthetic construct
  misc_feature 1..158: note = Synthetic nucleic acid
  source 1..158: mol_type = other DNA
cagacgacggccagtgtcgacatgagacgaacatttacagcagaggaaaaagcctctgtttttgaactataacacttcttgcggcgatggttcctggctcttcgatcaattgaaaggggtgttgcattgacagatacaggatcctacggtcattcagc

SEQ ID NO: 1118 - DNA, 158 bp, synthetic construct
  misc_feature 1..158: note = Synthetic nucleic acid
  source 1..158: mol_type = other DNA
cagacgacggccagtgtcgacatggatttttctttaactgaagaacaagaactgctgctggccaaacacttcttgcggcgatggttcctggctcttcgatcaggtcggcagatcctgaaagactatcagaacaaaaagggatcctacggtcattcagc

SEQ ID NO: 1119 - DNA, 158 bp, synthetic construct
  misc_feature 1..158: note = Synthetic nucleic acid
  source 1..158: mol_type = other DNA
cagacgacggccagtgtcgacatggcagcttcaacgttctttattccttctgtgaatgtcatcggaacacttcttgcggcgatggttcctggctcttcgatcgaagaaattgtggcgatttatcgcgcagcgatgtcgggatcctacggtcattcagc

SEQ ID NO: 1120 - DNA, 158 bp, synthetic construct
  misc_feature 1..158: note = Synthetic nucleic acid
  source 1..158: mol_type = other DNA
cagacgacggccagtgtcgacatgtcacttgtcaccgatctacccgccattttcgatcagttctaacacttcttgcggcgatggttcctggctcttcgatccagtacccgtgtcgcggcctttattgagatgctggtaggatcctacggtcattcagc

SEQ ID NO: 1121 - DNA, 158 bp, synthetic construct
  misc_feature 1..158: note = Synthetic nucleic acid
  source 1..158: mol_type = other DNA
cagacgacggccagtgtcgacatgtttgaaccaatggaacttaccaatgacgcggtgattaaagtaacacttcttgcggcgatggttcctggctcttcgatcgatatcccagcattcctgcgtaagcaagctgatataggatcctacggtcattcagc

SEQ ID NO: 1122 - DNA, 158 bp, synthetic construct
  misc_feature 1..158: note = Synthetic nucleic acid
  source 1..158: mol_type = other DNA
cagacgacggccagtgtcgacatgaaaatcaccaaaattaccacgtatcgtttacctccccgctaacacttcttgcggcgatggttcctggctcttcgatcctggcgtcatgaagataacagcgtagcagagtgggagggatcctacggtcattcagc

SEQ ID NO: 1123 - DNA, 158 bp, synthetic construct
  misc_feature 1..158: note = Synthetic nucleic acid
  source 1..158: mol_type = other DNA
cagacgacggccagtgtcgacatgaaagcattacattttggcgcaggtaatatcggtcgtggaacacttcttgcggcgatggttcctggctcttcgatcgtatccgaggcggtaaccgcttataaagcaatgcaaaagggatcctacggtcattcagc

SEQ ID NO: 1124 - DNA, 158 bp, synthetic construct
  misc_feature 1..158: note = Synthetic nucleic acid
  source 1..158: mol_type = other DNA
cagacgacggccagtgtcgacatgactgaacagcgtccattaacgattgccctggtcgccggaaacacttcttgcggcgatggttcctggctcttcgatcagcaggcggcacaagccgttctggagttagcacaacttggatcctacggtcattcagc

SEQ ID NO: 1125 - DNA, 158 bp, synthetic construct
  misc_feature 1..158: note = Synthetic nucleic acid
  source 1..158: mol_type = other DNA
cagacgacggccagtgtcgacatgaggcgcttcgcaggcgcatgtcgtttcgttttcaataacacttcttgcggcgatggttcctggctcttcgatctgaagcaggaacccaccgaaatgattcaggcgacagccgtgggatcctacggtcattcagc

SEQ ID NO: 1126 - DNA, 158 bp, synthetic construct
  misc_feature 1..158: note = Synthetic nucleic acid
  source 1..158: mol_type = other DNA
cagacgacggccagtgtcgacatgagtctgaaagaaaaaacacaatctctgtttgccaacgcatttgaacacttcttgcggcgatggttcctggctcttcgatcttgtaaaccatcacaaggagcaggacagtgcccgggatcctacggtcattcagc

SEQ ID NO: 1127 - DNA, 158 bp, synthetic construct
  misc_feature 1..158: note = Synthetic nucleic acid
  source 1..158: mol_type = other DNA
cagacgacggccagtgtcgacatgagttcatcgtgtatagaagaagtcagtgtaccggatgacaactggtaaacacttcttgcggcgatggttcctggctcttcgatcgttgaaaacggccttcgagtggctcgccgaggatcctacggtcattcagc

SEQ ID NO: 1128 - DNA, 158 bp, synthetic construct
  misc_feature 1..158: note = Synthetic nucleic acid
  source 1..158: mol_type = other DNA
cagacgacggccagtgtcgacatgcaggatgcagcgccccgtctgactttcactttacgagacgaaaacacttcttgcggcgatggttcctggctcttcgatccccatctacctgcgctgactcaggaggtggcacaaggatcctacggtcattcagc

SEQ ID NO: 1129 - DNA, 158 bp, synthetic construct
  misc_feature 1..158: note = Synthetic nucleic acid
  source 1..158: mol_type = other DNA
cagacgacggccagtgtcgacatggctaacagaatgattctgaacgaaacggcatggtttggtaacacttcttgcggcgatggttcctggctcttcgatcttgaggatattgtagagctttaccataccgcctggatgggatcctacggtcattcagc

SEQ ID NO: 1130 - DNA, 158 bp, synthetic construct
  misc_feature 1..158: note = Synthetic nucleic acid
  source 1..158: mol_type = other DNA
cagacgacggccagtgtcgacatgtatgcattaacccagggccggatctttaccggcaacacttcttgcggcgatggttcctggctcttcgatctcaccaagaccatcgttaacggtaacgaggtcgtaactcaatacggatcctacggtcattcagc

SEQ ID NO: 1131 - DNA, 158 bp, synthetic construct
  misc_feature 1..158: note = Synthetic nucleic acid
  source 1..158: mol_type = other DNA
cagacgacggccagtgtcgacatgtccacgtatacccagcctgtcatgcttttgctgtctggcctaacacttcttgcggcgatggttcctggctcttcgatcgccggtcatacgccgaaacccgttgctcacgtgtcgggatcctacggtcattcagc

SEQ ID NO: 1132 - DNA, 158 bp, synthetic construct
  misc_feature 1..158: note = Synthetic nucleic acid
  source 1..158: mol_type = other DNA
cagacgacggccagtgtcgacgtgtctgacgagagcgacgacaaaacagaagccccaacacttcttgcggcgatggttcctggctcttcgatcccggaagccctggattttattaacgagaaaccgacccatgagcgtggatcctacggtcattcagc

SEQ ID NO: 1133 - DNA, 158 bp, synthetic construct
  misc_feature 1..158: note = Synthetic nucleic acid
  source 1..158: mol_type = other DNA
cagacgacggccagtgtcgacttgattaagtcagcgctattggttctggaagacggaaccaacacttcttgcggcgatggttcctggctcttcgatcttatcgagttaattgagcagtaccgtaaaaccgctaagcttggatcctacggtcattcagc

SEQ ID NO: 1134 - DNA, 158 bp, synthetic construct
  misc_feature 1..158: note = Synthetic nucleic acid
  source 1..158: mol_type = other DNA
cagacgacggccagtgtcgacatgaaaatcgtaatcgccccagactcttataaagaaagtttatctgccagcgaaacacttcttgcggcgatggttcctggctcttcgatcgcgattggaatgcgcaacgcgggggcaggatcctacggtcattcagc

SEQ ID NO: 1135 - DNA, 158 bp, synthetic construct
  misc_feature 1..158: note = Synthetic nucleic acid
  source 1..158: mol_type = other DNA
cagacgacggccagtgtcgacatgagcaagacatttgcccgcagcagcctgtgtgcgctaacacttcttgcggcgatggttcctggctcttcgatccgctggacgcaggattacattgccattatgggcggtcgcgttggatcctacggtcattcagc

SEQ ID NO: 1136 - DNA, 158 bp, synthetic construct
  misc_feature 1..158: note = Synthetic nucleic acid
  source 1..158: mol_type = other DNA
cagacgacggccagtgtcgacatgagtctgaatatgttctggtttttaccgacccacggtgacaacacttcttgcggcgatggttcctggctcttcgatccgaatgattttatcccccgtaaagtcgcgcaaagcctcggatcctacggtcattcagc

SEQ ID NO: 1137 - DNA, 158 bp, synthetic construct
  misc_feature 1..158: note = Synthetic nucleic acid
  source 1..158: mol_type = other DNA
cagacgacggccagtgtcgacatgagcgcgggaagcccaaaattcaccgttcgccgcattaacacttcttgcggcgatggttcctggctcttcgatcggaaatccgtaaacccgctgcgttatttgccgcagcgatcgggatcctacggtcattcagc

SEQ ID NO: 1138 - DNA, 158 bp, synthetic construct
  misc_feature 1..158: note = Synthetic nucleic acid
  source 1..158: mol_type = other DNA
cagacgacggccagtgtcgacatgatcgattatgaagtattgcgttttatctggtggctgctggttaacacttcttgcggcgatggttcctggctcttcgatcaagatattgaacgtaacacccactctctgtactacggatcctacggtcattcagc

SEQ ID NO: 1139 - DNA, 158 bp, synthetic construct
  misc_feature 1..158: note = Synthetic nucleic acid
  source 1..158: mol_type = other DNA
cagacgacggccagtgtcgacatggttttgcaatccacgcgctggttggcgctcggaacacttcttgcggcgatggttcctggctcttcgatccttccggcaatgtttttgcgcccgaaagttgttccctcatgcatcggatcctacggtcattcagc

SEQ ID NO: 1140 - DNA, 158 bp, synthetic construct
  misc_feature 1..158: note = Synthetic nucleic acid
  source 1..158: mol_type = other DNA
cagacgacggccagtgtcgacatgtcagaatttttgcctttttcgcgaccagcaatgggcgtaacacttcttgcggcgatggttcctggctcttcgatccatgtcatcacagcccttcagcaactcgcaggacaacatggatcctacggtcattcagc

SEQ ID NO: 1141 - DNA, 158 bp, synthetic construct
  misc_feature 1..158: note = Synthetic nucleic acid
  source 1..158: mol_type = other DNA
cagacgacggccagtgtcgacatgtcagagcccctcgatctcaatcagttagcgcaaaaaattaaacaaacacttcttgcggcgatggttcctggctcttcgatcgtgattgaaaaagggttaccgcgtgacgccgaaggatcctacggtcattcagc

SEQ ID NO: 1142 - DNA, 158 bp, synthetic construct
  misc_feature 1..158: note = Synthetic nucleic acid
  source 1..158: mol_type = other DNA
cagacgacggccagtgtcgacatgagccacttagacaacggtttccgttcactgacactacaacgttttaacacttcttgcggcgatggttcctggctcttcgatctgaaagcggtgaagctgggacgtcgtcgggatggatcctacggtcattcagc

SEQ ID NO: 1143 - DNA, 158 bp, synthetic construct
  misc_feature 1..158: note = Synthetic nucleic acid
  source 1..158: mol_type = other DNA
cagacgacggccagtgtcgacatgattatcaataacgttaagctggtgctggaaaacgaggtggtaagaacacttcttgcggcgatggttcctggctcttcgatccacgtctggcgtcagggtaaaagggtgttcgggggatcctacggtcattcagc

SEQ ID NO: 1144 - DNA, 158 bp, synthetic construct
  misc_feature 1..158: note = Synthetic nucleic acid
  source 1..158: mol_type = other DNA
cagacgacggccagtgtcgacatggaacttaaaaaattgatgggacatatttctattatccccgattacagacaagcctaacacttcttgcggcgatggttcctggctcttcgatctacggggagcgggctttcgtccggatcctacggtcattcagc

SEQ ID NO: 1145 - DNA, 158 bp, synthetic construct
  misc_feature 1..158: note = Synthetic nucleic acid
  source 1..158: mol_type = other DNA
cagacgacggccagtgtcgacatggatctattgattgttttaacttacgtggcgctggcgtaacacttcttgcggcgatggttcctggctcttcgatcaatgaccagctggatgcattatctttatttggatcatggcggatcctacggtcattcagc

SEQ ID NO: 1146 - DNA, 158 bp, synthetic construct
  misc_feature 1..158: note = Synthetic nucleic acid
  source 1..158: mol_type = other DNA
cagacgacggccagtgtcgacatgggacagagtaaaaaattgaataaacaaccgagttcgctttcaccaacacttcttgcggcgatggttcctggctcttcgatcgaggtcgtactggctgatgaagaacacaaggtgggatcctacggtcattcagc

SEQ ID NO: 1147 - DNA, 158 bp, synthetic construct
  misc_feature 1..158: note = Synthetic nucleic acid
  source 1..158: mol_type = other DNA
cagacgacggccagtgtcgacatggttaaattacctccgctgagtctctacattcacatcccgtaacacttcttgcggcgatggttcctggctcttcgatctttaaattcgctgctggagctttttctggctgagatgggatcctacggtcattcagc

SEQ ID NO: 1148 - DNA, 158 bp, synthetic construct
  misc_feature 1..158: note = Synthetic nucleic acid
  source 1..158: mol_type = other DNA
cagacgacggccagtgtcgacatgtctgaactgaacgatcttctgaccacccgtgagctacaaaacacttcttgcggcgatggttcctggctcttcgatcagctggcatcatggcttgcggagaatcttcagtcatcgggatcctacggtcattcagc

SEQ ID NO: 1149 - DNA, 158 bp, synthetic construct
  misc_feature 1..158: note = Synthetic nucleic acid
  source 1..158: mol_type = other DNA
cagacgacggccagtgtcgacatgtttgattatgaaacattgcgcttcatctggtggctgctaacacttcttgcggcgatggttcctggctcttcgatcacagaaactctccgccgtaacgaaaacgagttgtacatcggatcctacggtcattcagc

SEQ ID NO: 1150 - DNA, 158 bp, synthetic construct
  misc_feature 1..158: note = Synthetic nucleic acid
  source 1..158: mol_type = other DNA
cagacgacggccagtgtcgacgtgaaaatccttgttgatgaaaatatgccttatgcccgcgacttatttagaacacttcttgcggcgatggttcctggctcttcgatctttaacgccgttcatcatccggcacgtcctggatcctacggtcattcagc

SEQ ID NO: 1151 - DNA, 158 bp, synthetic construct
  misc_feature 1..158: note = Synthetic nucleic acid
  source 1..158: mol_type = other DNA
cagacgacggccagtgtcgacatgaaaaccttcagcgatcgctggcgacaactggactgggaaacacttcttgcggcgatggttcctggctcttcgatctgggacagctatctgggacgcgcctcgcaaagactaaacggatcctacggtcattcagc

SEQ ID NO: 1152 - DNA, 158 bp, synthetic construct
  misc_feature 1..158: note = Synthetic nucleic acid
  source 1..158: mol_type = other DNA
cagacgacggccagtgtcgacatgaaaagcaaagtactggcacttttaattcctgccctgctaacacttcttgcggcgatggttcctggctcttcgatcgatgatattgtcgctttaggtctggtttatcagttcgttggatcctacggtcattcagc

SEQ ID NO: 1153 - DNA, 158 bp, synthetic construct
  misc_feature 1..158: note = Synthetic nucleic acid
  source 1..158: mol_type = other DNA
cagacgacggccagtgtcgacatgagtaacccgatcctgtcctggcgtcgcgtacgggaacacttcttgcggcgatggttcctggctcttcgatctatcggcctgacgtggctgaaaaccaaacgtcggctggattcaggatcctacggtcattcagc

SEQ ID NO: 1154 - DNA, 158 bp, synthetic construct
  misc_feature 1..158: note = Synthetic nucleic acid
  source 1..158: mol_type = other DNA
cagacgacggccagtgtcgacatgagtaacggcattgtgatcatcggttcgggcttaacacttcttgcggcgatggttcctggctcttcgatccggatgaaagaggcatttggattgttgaaaacattgccgatgacaggatcctacggtcattcagc

SEQ ID NO: 1155 - DNA, 158 bp, synthetic construct
  misc_feature 1..158: note = Synthetic nucleic acid
  source 1..158: mol_type = other DNA
cagacgacggccagtgtcgacatgtcatcactgaatattaaacagggaagtgacgctcattttcccgattataacacttcttgcggcgatggttcctggctcttcgatcatgccatgatggcagaccacttagttaacggatcctacggtcattcagc

SEQ ID NO: 1156 - DNA, 158 bp, synthetic construct
  misc_feature 1..158: note = Synthetic nucleic acid
  source 1..158: mol_type = other DNA
cagacgacggccagtgtcgacatgttcaaaacgacgctctgcgccttattaattaccgcctcttgaacacttcttgcggcgatggttcctggctcttcgatcgacgccgcctggcagattcttaacgctctacagcatggatcctacggtcattcagc

SEQ ID NO: 1157 - DNA, 158 bp, synthetic construct
  misc_feature 1..158: note = Synthetic nucleic acid
  source 1..158: mol_type = other DNA
cagacgacggccagtgtcgacgtgaatgacgctatccctcgcccgcaggcgaaaacccaacacttcttgcggcgatggttcctggctcttcgatctttgtgctgggaagtggacagctgtgtggtgctgacggttcttggatcctacggtcattcagc

SEQ ID NO: 1158 - DNA, 158 bp, synthetic construct
  misc_feature 1..158: note = Synthetic nucleic acid
  source 1..158: mol_type = other DNA
cagacgacggccagtgtcgacatgattccatttaacgcaccgccggtggtgggaaaacacttcttgcggcgatggttcctggctcttcgatccaatcagcgtacggtaattgcgactttgttgaactacttttccgcaggatcctacggtcattcagc

SEQ ID NO: 1159 - DNA, 158 bp, synthetic construct
  misc_feature 1..158: note = Synthetic nucleic acid
  source 1..158: mol_type = other DNA
cagacgacggccagtgtcgacatggcatataccaccttttcacagacgaaaaatgatcagctcaaagaaaacacttcttgcggcgatggttcctggctcttcgatcacaccgacgatttgagtaacttccagctcataggatcctacggtcattcagc

SEQ ID NO: 1160 - DNA, 158 bp, synthetic construct
  misc_feature 1..158: note = Synthetic nucleic acid
  source 1..158: mol_type = other DNA
cagacgacggccagtgtcgacatggctaagcaagattattacgagattttaggcgtttccaaaacagcaacacttcttgcggcgatggttcctggctcttcgatcgtgaagaagttttttgacgacctgacccgctcgggatcctacggtcattcagc

SEQ ID NO: 1161 - DNA, 158 bp, synthetic construct
  misc_feature 1..158: note = Synthetic nucleic acid
  source 1..158: mol_type = other DNA
cagacgacggccagtgtcgacatgttccagttatccgtacaggacatccatccgggcgaaaaggccgaacacttcttgcggcgatggttcctggctcttcgatccgctatcgctgctggtcttggggagggcgcaaccggatcctacggtcattcagc

SEQ ID NO: 1162 - DNA, 158 bp, synthetic construct
  misc_feature 1..158: note = Synthetic nucleic acid
  source 1..158: mol_type = other DNA
cagacgacggccagtgtcgacgtgaaagtactgactgtatttggtacgcgcccggaaaacacttcttgcggcgatggttcctggctcttcgatcctcgcattctggaagcgttaaaaaataatcggatatcactaataggatcctacggtcattcagc

SEQ ID NO: 1163 - DNA, 158 bp, synthetic construct
  misc_feature 1..158: note = Synthetic nucleic acid
  source 1..158: mol_type = other DNA
cagacgacggccagtgtcgacatgaaatttgaactggacaccaccgacggtcgcgcacgaacacttcttgcggcgatggttcctggctcttcgatccagcgtcaggggcgagaagtaccacctttgaacgttgatcgaggatcctacggtcattcagc

SEQ ID NO: 1164 - DNA, 158 bp, synthetic construct
  misc_feature 1..158: note = Synthetic nucleic acid
  source 1..158: mol_type = other DNA
cagacgacggccagtgtcgacatgaccattaacttccgccgtaacgcattgcagttgagcgtggctaacacttcttgcggcgatggttcctggctcttcgatctggcgcaacttcgcggtgtgctgggactggatctcggatcctacggtcattcagc

SEQ ID NO: 1165 - DNA, 158 bp, synthetic construct
  misc_feature 1..158: note = Synthetic nucleic acid
  source 1..158: mol_type = other DNA
cagacgacggccagtgtcgacatgattcgcttagcgcccttgattaccgccgacgttgacaaacacttcttgcggcgatggttcctggctcttcgatcgcgtgtaacaggcaacagcggcgttgatattttcgccggtggatcctacggtcattcagc

SEQ ID NO: 1166 - DNA, 158 bp, synthetic construct
  misc_feature 1..158: note = Synthetic nucleic acid
  source 1..158: mol_type = other DNA
cagacgacggccagtgtcgacatgcaaagcgttaccccaacatcgcaatacctgaaggcgcttaataacacttcttgcggcgatggttcctggctcttcgatcaagagtatctgaagcgcgagcatttggcgggtagaggatcctacggtcattcagc

SEQ ID NO: 1167 - DNA, 158 bp, synthetic construct
  misc_feature 1..158: note = Synthetic nucleic acid
  source 1..158: mol_type = other DNA
cagacgacggccagtgtcgacatgcagtgcgcactttacgacgcgggtcgctgtcgttaacacttcttgcggcgatggttcctggctcttcgatctaccgcgcactatgaagtgctgacgctgctggtgaagcaattcggatcctacggtcattcagc

SEQ ID NO: 1168 - DNA, 158 bp, synthetic construct
  misc_feature 1..158: note = Synthetic nucleic acid
  source 1..158: mol_type = other DNA
cagacgacggccagtgtcgacatggaacaacgccacatcaccggcaaaagccaaacacttcttgcggcgatggttcctggctcttcgatctgtggctggataaatcgcttaaaaatcgcgttgggtgagacatatatcggatcctacggtcattcagc

SEQ ID NO: 1169 - DNA, 158 bp, synthetic construct
  misc_feature 1..158: note = Synthetic nucleic acid
  source 1..158: mol_type = other DNA
cagacgacggccagtgtcgacatggaatcgctctcagaaggaaccacagcaggctaccagcaaataacacttcttgcggcgatggttcctggctcttcgatccaggcggtgctagaggaaggctatagacgccgtggcggatcctacggtcattcagc

SEQ ID NO: 1170 - DNA, 158 bp, synthetic construct
  misc_feature 1..158: note = Synthetic nucleic acid
  source 1..158: mol_type = other DNA
cagacgacggccagtgtcgacatggcagccagaccgcgtaagaataatgtttcagtccaacacttcttgcggcgatggttcctggctcttcgatctcatgatgatcgaggtaaaggatggagcaaagtagcgttgtgcggatcctacggtcattcagc

SEQ ID NO: 1171 - DNA, 158 bp, synthetic construct
  misc_feature 1..158: note = Synthetic nucleic acid
  source 1..158: mol_type = other DNA
cagacgacggccagtgtcgacatgtcgtgcccggttattgagctgacacaacagcttattcaacacttcttgcggcgatggttcctggctcttcgatcccgtatgtatcaacgtatcatggaacagctcgtcgccgcgggatcctacggtcattcagc

SEQ ID NO: 1172 - DNA, 158 bp, synthetic construct
  misc_feature 1..158: note = Synthetic nucleic acid
  source 1..158: mol_type = other DNA
cagacgacggccagtgtcgacttgaattaccaaatgattaccacggacgatgcgctggcttaacacttcttgcggcgatggttcctggctcttcgatcggaagcattacacaatttattgcaggaatatccgcaggtgggatcctacggtcattcagc

SEQ ID NO: 1173 - DNA, 158 bp, synthetic construct
  misc_feature 1..158: note = Synthetic nucleic acid
  source 1..158: mol_type = other DNA
cagacgacggccagtgtcgacatgagcaatctgagccctgactttgtactacccgaaaatttttgaacacttcttgcggcgatggttcctggctcttcgatcttccataatctgctggcgcaggtgtttaaggaccttggatcctacggtcattcagc

SEQ ID NO: 1174 - DNA, 158 bp, synthetic construct
  misc_feature 1..158: note = Synthetic nucleic acid
  source 1..158: mol_type = other DNA
cagacgacggccagtgtcgacatgcgccatttacgcaatatttttaatctgggtatcaaagagttgcgaacacttcttgcggcgatggttcctggctcttcgatccgattcaggaagacgattgggacaatggcgtctggatcctacggtcattcagc

SEQ ID NO: 1175 - DNA, 158 bp, synthetic construct
  misc_feature 1..158: note = Synthetic nucleic acid
  source 1..158: mol_type = other DNA
cagacgacggccagtgtcgacatggtcgatacagaaatttggctgcgtttaatgagtatcagcagaacacttcttgcggcgatggttcctggctcttcgatcgcatgccatgttcgacgtactaatgtatttgttcagggatcctacggtcattcagc

SEQ ID NO: 1176 - DNA, 158 bp, synthetic construct
  misc_feature 1..158: note = Synthetic nucleic acid
  source 1..158: mol_type = other DNA
cagacgacggccagtgtcgacatgcgttttgttgatgaatatcgcgcgccggaacaggtgataacacttcttgcggcgatggttcctggctcttcgatcgcgtggtatcagtatcgtcagcaggagagtgaagcgcccggatcctacggtcattcagc

SEQ ID NO: 1177 - DNA, 158 bp, synthetic construct
  misc_feature 1..158: note = Synthetic nucleic acid
  source 1..158: mol_type = other DNA
cagacgacggccagtgtcgacatggaataccaactcactcttaactggcccgattttcttgaacgtaacacttcttgcggcgatggttcctggctcttcgatctggtcaatagcgggtattggttcttcgaagggtccggatcctacggtcattcagc

SEQ ID NO: 1178 - DNA, 158 bp, synthetic construct
  misc_feature 1..158: note = Synthetic nucleic acid
  source 1..158: mol_type = other DNA
cagacgacggccagtgtcgacatggttgctgaattgaccgcattacgcgatcaaattgatgaagtaacacttcttgcggcgatggttcctggctcttcgatcgtgttattgcgtcaggcgaatgacaatcgccaggtaggatcctacggtcattcagc

SEQ ID NO: 1179 - DNA, 158 bp, synthetic construct
  misc_feature 1..158: note = Synthetic nucleic acid
  source 1..158: mol_type = other DNA
cagacgacggccagtgtcgacatgtcaaaagtcgctctcatcaccggtgtaaccggacaagacggttcttaaacacttcttgcggcgatggttcctggctcttcgatctacgacgtggcgatcgcgctggagtcatggggatcctacggtcattcagc

SEQ ID NO: 1180 - DNA, 158 bp, synthetic construct
  misc_feature 1..158: note = Synthetic nucleic acid
  source 1..158: mol_type = other DNA
cagacgacggccagtgtcgacatgtcattttctgtgcaggaaaccctgttctcgcttttgcaaacacttcttgcggcgatggttcctggctcttcgatccctgattcaggcactacacaagaggcacatccattaagcggatcctacggtcattcagc

SEQ ID NO: 1181 - DNA, 158 bp, synthetic construct
  misc_feature 1..158: note = Synthetic nucleic acid
  source 1..158: mol_type = other DNA
cagacgacggccagtgtcgacatgaaatacgatctcatcattattggcagcggttccgtaggcgaacacttcttgcggcgatggttcctggctcttcgatctgatttgacgccattcaggctttcccgcttccaatcgggatcctacggtcattcagc

SEQ ID NO: 1182 - DNA, 158 bp, synthetic construct
  misc_feature 1..158: note = Synthetic nucleic acid
  source 1..158: mol_type = other DNA
cagacgacggccagtgtcgacatgaataacgaggaaacattttaccaggccatgcggcgtaacacttcttgcggcgatggttcctggctcttcgatcaaaccgaacatcagccaggcaatgaggataaacaggcaacgggatcctacggtcattcagc

SEQ ID NO: 1183 - DNA, 158 bp, synthetic construct
  misc_feature 1..158: note = Synthetic nucleic acid
  source 1..158: mol_type = other DNA
cagacgacggccagtgtcgacatgactggagataacaccctcatccattctcacggcattaaaacacttcttgcggcgatggttcctggctcttcgatccagcaaaagaaagataacgctgactcacggggagaaaatggatcctacggtcattcagc

SEQ ID NO: 1184 - DNA, 158 bp, synthetic construct
  misc_feature 1..158: note = Synthetic nucleic acid
  source 1..158: mol_type = other DNA
cagacgacggccagtgtcgacatgagcctgccttttttacgcacgctgcaaggcgataacacttcttgcggcgatggttcctggctcttcgatccgttggtgggatatgttttgttagttatactcccggccaacgttggatcctacggtcattcagc

SEQ ID NO: 1185 - DNA, 158 bp, synthetic construct
  misc_feature 1..158: note = Synthetic nucleic acid
  source 1..158: mol_type = other DNA
cagacgacggccagtgtcgacatgattaattatggcgttgttggtgttggatactttggcgctaacacttcttgcggcgatggttcctggctcttcgatcaaatcagtgagatcattaaacatacatcagtaatgccaggatcctacggtcattcagc

SEQ ID NO: 1186 - DNA, 158 bp, synthetic construct
  misc_feature 1..158: note = Synthetic nucleic acid
  source 1..158: mol_type = other DNA
cagacgacggccagtgtcgacatgcataaccaggctccaattcaacgtagaaaatcaacacgtatttacgttaacacttcttgcggcgatggttcctggctcttcgatcgaattgacgttcagcaggttgaaaaaccaggatcctacggtcattcagc

SEQ ID NO: 1187 - DNA, 158 bp, synthetic construct
  misc_feature 1..158: note = Synthetic nucleic acid
  source 1..158: mol_type = other DNA
cagacgacggccagtgtcgacatgccattacccgattttcatgtttctgaaccttttaccctcggtattaacacttcttgcggcgatggttcctggctcttcgatcaaaagcattgtgagatctgggccggtgacccaggatcctacggtcattcagc

SEQ ID NO: 1188 - DNA, 158 bp, synthetic construct
  misc_feature 1..158: note = Synthetic nucleic acid
  source 1..158: mol_type = other DNA
cagacgacggccagtgtcgacatgaaaaagcggaaaaccgtgaagaagcgttacgttattgcgctaacacttcttgcggcgatggttcctggctcttcgatcgtgattggtgaggccaaaccaggagctgcacaaccaggatcctacggtcattcagc

SEQ ID NO: 1189 - DNA, 158 bp, synthetic construct
  misc_feature 1..158: note = Synthetic nucleic acid
  source 1..158: mol_type = other DNA
cagacgacggccagtgtcgacatgcatcgacaatcctttttccttgtgccccttatttgtctttaacacttcttgcggcgatggttcctggctcttcgatccagtggggaattacttaaagttagcccacgcaataggggatcctacggtcattcagc

SEQ ID NO: 1190 - DNA, 158 bp, synthetic construct
  misc_feature 1..158: note = Synthetic nucleic acid
  source 1..158: mol_type = other DNA
cagacgacggccagtgtcgacatggttacgccagtaagcatcagcaattacatatctcttcctgatgattttaacacttcttgcggcgatggttcctggctcttcgatcaaacgccagacctccctgaacgtcattctggatcctacggtcattcagc

SEQ ID NO: 1191 - DNA, 158 bp, synthetic construct
  misc_feature 1..158: note = Synthetic nucleic acid
  source 1..158: mol_type = other DNA
cagacgacggccagtgtcgacatgttcccaaaaataatgaatgatgaaaactttttcaaaaaagcggcggcgcaaacacttcttgcggcgatggttcctggctcttcgatccgtaaccgcaccgaagtggcggcctggggatcctacggtcattcagc

SEQ ID NO: 1192 - DNA, 158 bp, synthetic construct
  misc_feature 1..158: note = Synthetic nucleic acid
  source 1..158: mol_type = other DNA
cagacgacggccagtgtcgacatgacggataatccgaataaaaaaacattctgggataaagtccatctcgatccaacacttcttgcggcgatggttcctggctcttcgatcaggaaaatgttgtcgaaaagcgtgcccggatcctacggtcattcagc

SEQ ID NO: 1193 - DNA, 158 bp, synthetic construct
  misc_feature 1..158: note = Synthetic nucleic acid
  source 1..158: mol_type = other DNA
cagacgacggccagtgtcgacatggtaaatgttcgtcagcccagggatgtcgcaaacacttcttgcggcgatggttcctggctcttcgatcaagaaattctcgaagaacttggcgaaatcgagaaaccgaataaggtgggatcctacggtcattcagc

SEQ ID NO: 1194 - DNA, 158 bp, synthetic construct
  misc_feature 1..158: note = Synthetic nucleic acid
  source 1..158: mol_type = other DNA
cagacgacggccagtgtcgacatgaaacggaatgcgaaaactatcatcgcagggatgattgcactggcaatttaacacttcttgcggcgatggttcctggctcttcgatccgacggttcatccacggcagccaagaaaggatcctacggtcattcagc

SEQ ID NO: 1195 - DNA, 158 bp, synthetic construct
  misc_feature 1..158: note = Synthetic nucleic acid
  source 1..158: mol_type = other DNA
cagacgacggccagtgtcgacatgaaatcacgtgctgccgttgcatttgctcccaacacttcttgcggcgatggttcctggctcttcgatcacctgatgcatgaaggcaaatccattcgaaccgtaattcgttacgtcggatcctacggtcattcagc

SEQ ID NO: 1196 - DNA, 158 bp, synthetic construct
  misc_feature 1..158: note = Synthetic nucleic acid
  source 1..158: mol_type = other DNA
cagacgacggccagtgtcgacatgaaatcgggccgctttattggcgttatgtcaggcaccagaacacttcttgcggcgatggttcctggctcttcgatcgagacggtactgggggctattttccccgctaacccgcttggatcctacggtcattcagc

SEQ ID NO: 1197 - DNA, 158 bp, synthetic construct
  misc_feature 1..158: note = Synthetic nucleic acid
  source 1..158: mol_type = other DNA
cagacgacggccagtgtcgacatgaacgaacaatcccaggccaaatcaccagaagccttgcgaacacttcttgcggcgatggttcctggctcttcgatcgaagtcattccaggcgagatttccttccgcgcggtccccggatcctacggtcattcagc

SEQ ID NO: 1198 - DNA, 158 bp, synthetic construct
  misc_feature 1..158: note = Synthetic nucleic acid
  source 1..158: mol_type = other DNA
cagacgacggccagtgtcgacgtggcgacattaatccggctttttattcatcctgttaaatcgatgcaacacttcttgcggcgatggttcctggctcttcgatctgtaccgaagactgcacttaagttggcgcgtcatggatcctacggtcattcagc

SEQ ID NO: 1199 - DNA, 158 bp, synthetic construct
  misc_feature 1..158: note = Synthetic nucleic acid
  source 1..158: mol_type = other DNA
cagacgacggccagtgtcgacatgaatgtgttgcgtagtggaatcgtgacgatgctgctgaacacttcttgcggcgatggttcctggctcttcgatctattacctgactggggccaggaatgcgcaaattcacacttaggatcctacggtcattcagc

SEQ ID NO: 1200 - DNA, 158 bp, synthetic construct
  misc_feature 1..158: note = Synthetic nucleic acid
  source 1..158: mol_type = other DNA
cagacgacggccagtgtcgacatgtctgaaaccgcaaaaaaagtaatcgtcggcatgtccggcggtaacacttcttgcggcgatggttcctggctcttcgatcgtattattgagcagcgtctgccgctgccggtcagaggatcctacggtcattcagc

SEQ ID NO: 1201 - DNA, 158 bp, synthetic construct
  misc_feature 1..158: note = Synthetic nucleic acid
  source 1..158: mol_type = other DNA
cagacgacggccagtgtcgacatgtttcatcgcttatggacgttaatccgcaaagagttgcagtaacacttcttgcggcgatggttcctggctcttcgatcagcggcgtacgcgatgtttagacgtaaggtgatgtttggatcctacggtcattcagc

SEQ ID NO: 1202 - DNA, 158 bp, synthetic construct
  misc_feature 1..158: note = Synthetic nucleic acid
  source 1..158: mol_type = other DNA
cagacgacggccagtgtcgacatgaaaaatgttggttttatcggctggcgcggtatggtcggctccgttaacacttcttgcggcgatggttcctggctcttcgatccgctgcgtcggatgcttcgtcaactggcgcatggatcctacggtcattcagc

SEQ ID NO: 1203 - DNA, 158 bp, synthetic construct
  misc_feature 1..158: note = Synthetic nucleic acid
  source 1..158: mol_type = other DNA
cagacgacggccagtgtcgacatgaaagttaaagtactgtccctcctggtcccagctctaacacttcttgcggcgatggttcctggctcttcgatcactgataacatcgtagctctgggtctggtttaccagttcgcgggatcctacggtcattcagc

SEQ ID NO: 1204 - DNA, 158 bp, synthetic construct
  misc_feature 1..158: note = Synthetic nucleic acid
  source 1..158: mol_type = other DNA
cagacgacggccagtgtcgacatgaacataaagggtaaagcgttactggcaggatgtatcgcgctggcattaacacttcttgcggcgatggttcctggctcttcgatcgccaacggcacggcgaccgatgcgaagggatcctacggtcattcagccgc

SEQ ID NO: 1205 - DNA, 158 bp, synthetic construct
  misc_feature 1..158: note = Synthetic nucleic acid
  source 1..158: mol_type = other DNA
cagacgacggccagtgtcgacatgaagccaatttttagccgtggcccgtcgctacagattcgccttattctggcaacacttcttgcggcgatggttcctggctcttcgatccctgcgcgtgcgccgggagggcaactaggatcctacggtcattcagc

SEQ ID NO: 1206 - DNA, 158 bp, synthetic construct
  misc_feature 1..158: note = Synthetic nucleic acid
  source 1..158: mol_type = other DNA
cagacgacggccagtgtcgacatgacaaaagtattgctgtctcatcccccgcgcccgaacacttcttgcggcgatggttcctggctcttcgatcagtatctggaaaaacgttttaacaccgggcgtacaccgcatgagggatcctacggtcattcagc

SEQ ID NO: 1207 - DNA, 158 bp, synthetic construct
  misc_feature 1..158: note = Synthetic nucleic acid
  source 1..158: mol_type = other DNA
cagacgacggccagtgtcgacatgagtgacagccagacgctggtggtaaaactcggcaccaaacacttcttgcggcgatggttcctggctcttcgatccccggttgccgttcaccgtgatgacatgattacccgttggggatcctacggtcattcagc

SEQ ID NO: 1208 - DNA, 158 bp, synthetic construct
  misc_feature 1..158: note = Synthetic nucleic acid
  source 1..158: mol_type = other DNA
cagacgacggccagtgtcgacatggaccgcattattcaatcaccgggtaaatacatccagggcgaacacttcttgcggcgatggttcctggctcttcgatcccagtacggtcagcgtttcctgcaagagtgggaaagaggatcctacggtcattcagc

SEQ ID NO: 1209 - DNA, 158 bp, synthetic construct
  misc_feature 1..158: note = Synthetic nucleic acid
  source 1..158: mol_type = other DNA
cagacgacggccagtgtcgacgtgcaggacgagtattacatggcgcgggcgctaaagctaacacttcttgcggcgatggttcctggctcttcgatccatgtaggcccggatgtttgcctgcatttagtgggtgcatctggatcctacggtcattcagc

SEQ ID NO: 1210 - DNA, 158 bp, synthetic construct
  misc_feature 1..158: note = Synthetic nucleic acid
  source 1..158: mol_type = other DNA
cagacgacggccagtgtcgacatgaaatttaccgtagaacgtgagcatttattaaaaccgctacaacaggtaacacttcttgcggcgatggttcctggctcttcgatcgcttatgttgtcatgccaatgagactgggaggatcctacggtcattcagc

SEQ ID NO: 1211 - DNA, 158 bp, synthetic construct
  misc_feature 1..158: note = Synthetic nucleic acid
  source 1..158: mol_type = other DNA
cagacgacggccagtgtcgacatgaataaggttgtattgctgtgccgtccgggctttgaaaaagagtgcgccaacacttcttgcggcgatggttcctggctcttcgatccggtgggtggtcgtcgcgacgagcgatcaggatcctacggtcattcagc

SEQ ID NO: 1212 - DNA, 158 bp, synthetic construct
  misc_feature 1..158: note = Synthetic nucleic acid
  source 1..158: mol_type = other DNA
cagacgacggccagtgtcgacatgacccccgaacaccttccaacagaacagtatgaagcgcaaacacttcttgcggcgatggttcctggctcttcgatccaccatatggagtgcggcgtattactgaccgcgaagcccggatcctacggtcattcagc

SEQ ID NO: 1213 - DNA, 158 bp, synthetic construct
  misc_feature 1..158: note = Synthetic nucleic acid
  source 1..158: mol_type = other DNA
cagacgacggccagtgtcgacatgcgagggaaaaaacgcattgggttattgtttttgctgataaacacttcttgcggcgatggttcctggctcttcgatctccagtacaacgccaaagatattaccgagaaacagcgaggatcctacggtcattcagc

SEQ ID NO: 1214 - DNA, 158 bp, synthetic construct
  misc_feature 1..158: note = Synthetic nucleic acid
  source 1..158: mol_type = other DNA
cagacgacggccagtgtcgacatgtcaaatgctcaagaggcggtaaaaacccgccacaaaacacttcttgcggcgatggttcctggctcttcgatcctggcactgtttgccgcctatttgatgacgatatttgcccagggatcctacggtcattcagc

SEQ ID NO: 1215 - DNA, 158 bp, synthetic construct
  misc_feature 1..158: note = Synthetic nucleic acid
  source 1..158: mol_type = other DNA
cagacgacggccagtgtcgacgtgataatcataagatatctggtgcgggagacgctcaaaagccagctaacacttcttgcggcgatggttcctggctcttcgatccgcgccagtttttcgcgtaaaggagcggtgaatggatcctacggtcattcagc

SEQ ID NO: 1216 - DNA, 158 bp, synthetic construct
  misc_feature 1..158: note = Synthetic nucleic acid
  source 1..158: mol_type = other DNA
cagacgacggccagtgtcgacatgaaaggacgttgggtaaagtaccttcttatgggcacggttgtggcaataacacttcttgcggcgatggttcctggctcttcgatcccgggcgcaggtaacgtctttagcggcttaggatcctacggtcattcagc

SEQ ID NO: 1217 - DNA, 158 bp, synthetic construct
  misc_feature 1..158: note = Synthetic nucleic acid
  source 1..158: mol_type = other DNA
cagacgacggccagtgtcgacatgagcattgagattgccaatattaagaagtcgtttggtcgcacccaaacacttcttgcggcgatggttcctggctcttcgatcgatgaggaacttgctctcgcacaaagcgcctctggatcctacggtcattcagc

SEQ ID NO: 1218 - DNA, 158 bp, synthetic construct
  misc_feature 1..158: note = Synthetic nucleic acid
  source 1..158: mol_type = other DNA
cagacgacggccagtgtcgacatgtcatctgaaaaactgtattccccactgaaagtgggcgcgatcaaacacttcttgcggcgatggttcctggctcttcgatccgcggaaggctataccgattacccgacgttgcttggatcctacggtcattcagc

SEQ ID NO: 1219 - DNA, 158 bp, synthetic construct
  misc_feature 1..158: note = Synthetic nucleic acid
  source 1..158: mol_type = other DNA
cagacgacggccagtgtcgacatgtttgaaattaatccggtaaataatcgcattcaggacctcacggaaaacacttcttgcggcgatggttcctggctcttcgatcttatcgaagcaagtttgaaagcagggttacgtggatcctacggtcattcagc

SEQ ID NO: 1220 - DNA, 158 bp, synthetic construct
  misc_feature 1..158: note = Synthetic nucleic acid
  source 1..158: mol_type = other DNA
cagacgacggccagtgtcgacgtgattaaatttctctctgcattaattcttctactggtcacgacggcgaacacttcttgcggcgatggttcctggctcttcgatcgatgtctgcgggcaaaactggaaatcatcaacggatcctacggtcattcagc

SEQ ID NO: 1221 - DNA, 158 bp, synthetic construct
  misc_feature 1..158: note = Synthetic nucleic acid
  source 1..158: mol_type = other DNA
cagacgacggccagtgtcgacatgcaagagagacacacggaacaggactatcgtgccctgctgattgctaacacttcttgcggcgatggttcctggctcttcgatccggaagtggcggaatgggttaaggcgcggacgggatcctacggtcattcagc

SEQ ID NO: 1222 - DNA, 158 bp, synthetic construct
  misc_feature 1..158: note = Synthetic nucleic acid
  source 1..158: mol_type = other DNA
cagacgacggccagtgtcgacatggaaaaactgcgggtaggaatcgtttttggtggtaaatcagaacacttcttgcggcgatggttcctggctcttcgatctcacgctgcggataacgcattgaaaaccacaatgctcggatcctacggtcattcagc

SEQ ID NO: 1223 - DNA, 158 bp, synthetic construct
  misc_feature 1..158: note = Synthetic nucleic acid
  source 1..158: mol_type = other DNA
cagacgacggccagtgtcgacatggcacaacagactcctttgtacgaacaacacacgctttgcggaacacttcttgcggcgatggttcctggctcttcgatccctgtttttgtgcgtaacggcaaagccgtcgcgcgtggatcctacggtcattcagc

SEQ ID NO: 1224 - DNA, 158 bp, synthetic construct
  misc_feature 1..158: note = Synthetic nucleic acid
  source 1..158: mol_type = other DNA
cagacgacggccagtgtcgacatgggcgcttacctgattcgccgtctgttgctggtaacacttcttgcggcgatggttcctggctcttcgatcagctatacgctggttgatccgcgtattgattttgagggacgtgcaggatcctacggtcattcagc

SEQ ID NO: 1225 - DNA, 158 bp, synthetic construct
  misc_feature 1..158: note = Synthetic nucleic acid
  source 1..158: mol_type = other DNA
cagacgacggccagtgtcgacatgtcgcgcgtcaatcctctatcttcgctgtcattgttggcgaacacttcttgcggcgatggttcctggctcttcgatcgcgtagacgaacggcgggcgcgttgtatgaaacagatgggatcctacggtcattcagc

SEQ ID NO: 1226 - DNA, 158 bp, synthetic construct
  misc_feature 1..158: note = Synthetic nucleic acid
  source 1..158: mol_type = other DNA
cagacgacggccagtgtcgacatgaaaagagcgcctcttataacaggtcttttgttgatatccacatcctaacacttcttgcggcgatggttcctggctcttcgatccacagccaccattaccgtcatcgtgcggactggatcctacggtcattcagc

SEQ ID NO: 1227 - DNA, 158 bp, synthetic construct
  misc_feature 1..158: note = Synthetic nucleic acid
  source 1..158: mol_type = other DNA
cagacgacggccagtgtcgacatgcattttctgcgccgaccaatatcgctgcgccaaaacacttcttgcggcgatggttcctggctcttcgatcgggtacggctgaagaaagatcagtacgtggcaaaccagataagcggatcctacggtcattcagc

SEQ ID NO: 1228 - DNA, 158 bp, synthetic construct
  misc_feature 1..158: note = Synthetic nucleic acid
  source 1..158: mol_type = other DNA
cagacgacggccagtgtcgacatgggattcaaatgcggtatcgtcggtttgcccaaaacacttcttgcggcgatggttcctggctcttcgatcatcgtgaaagatggcgatgtgatgaacttccttttcaacgtcacaggatcctacggtcattcagc

SEQ ID NO: 1229 - DNA, 158 bp, synthetic construct
  misc_feature 1..158: note = Synthetic nucleic acid
  source 1..158: mol_type = other DNA
cagacgacggccagtgtcgacatgtcgaagaattaccatattgccgtattgccgggggacggtattaacacttcttgcggcgatggttcctggctcttcgatcatatcattgcccgctatgtagcagaaggggtgcaaggatcctacggtcattcagc

SEQ ID NO: 1230 - DNA, 158 bp, synthetic construct
  misc_feature 1..158: note = Synthetic nucleic acid
  source 1..158: mol_type = other DNA
cagacgacggccagtgtcgacatgaataaccgggaaaaggagatccttgcaattttacggcgtaaaacacttcttgcggcgatggttcctggctcttcgatcgccgataacgcgctttcattagtgccaatggtgttgggatcctacggtcattcagc

SEQ ID NO: 1231 - DNA, 158 bp, synthetic construct
  misc_feature 1..158: note = Synthetic nucleic acid
  source 1..158: mol_type = other DNA
cagacgacggccagtgtcgacatgaattcatgtgattttcgtgtttttctgcaagagttcggtacaacgaacacttcttgcggcgatggttcctggctcttcgatctctctgaatgggtaatgaaagcaggtggtcctggatcctacggtcattcagc

SEQ ID NO: 1232 - DNA, 158 bp, synthetic construct
  misc_feature 1..158: note = Synthetic nucleic acid
  source 1..158: mol_type = other DNA
cagacgacggccagtgtcgacatgatgaagcgcaatattctggcagtgatcgtccctgctaacacttcttgcggcgatggttcctggctcttcgatccagacgacaccgttgctgtgggtatcgtttaccagttcctaggatcctacggtcattcagc

SEQ ID NO: 1233 - DNA, 158 bp, synthetic construct
  misc_feature 1..158: note = Synthetic nucleic acid
  source 1..158: mol_type = other DNA
cagacgacggccagtgtcgacatgcctcacaatcctatccgcgtggtcgtcggaacacttcttgcggcgatggttcctggctcttcgatcgatacgttgcgtgcagcgttcaaaaaagtggaatcgtttaaagcccatggatcctacggtcattcagc

SEQ ID NO: 1234 - DNA, 158 bp, synthetic construct
  misc_feature 1..158: note = Synthetic nucleic acid
  source 1..158: mol_type = other DNA
cagacgacggccagtgtcgacatgcgtaagcagtggctcgggatctgcatcgcaacacttcttgcggcgatggttcctggctcttcgatcttgcaaaccgaagcccaattacagtcatttattactaccgcgcaggagggatcctacggtcattcagc

SEQ ID NO: 1235 - DNA, 158 bp, synthetic construct
  misc_feature 1..158: note = Synthetic nucleic acid
  source 1..158: mol_type = other DNA
cagacgacggccagtgtcgacatggagaggattgtcgttactctcggggaacgtagttacccaattaaacacttcttgcggcgatggttcctggctcttcgatctcttaacgccattgccgattgtcaatcagcgcggggatcctacggtcattcagc

SEQ ID NO: 1236 - DNA, 158 bp, synthetic construct
  misc_feature 1..158: note = Synthetic nucleic acid
  source 1..158: mol_type = other DNA
cagacgacggccagtgtcgacatggctcaaatcttcaattttagttctggtccggcaatgctaccgaacacttcttgcggcgatggttcctggctcttcgatcacttcatggttgagttcgaacgccgtcacggtgcgggatcctacggtcattcagc

SEQ ID NO: 1237 - DNA, 158 bp, synthetic construct
  misc_feature 1..158: note = Synthetic nucleic acid
  source 1..158: mol_type = other DNA
cagacgacggccagtgtcgacatgtcaccgcagaataatcatctgcagcgtccgcctgctgctgtaacacttcttgcggcgatggttcctggctcttcgatccaggcttattatcaagcccgccaccgcctgccggctggatcctacggtcattcagc

SEQ ID NO: 1238 - DNA, 158 bp, synthetic construct
  misc_feature 1..158: note = Synthetic nucleic acid
  source 1..158: mol_type = other DNA
cagacgacggccagtgtcgacatgaagacgtttcctctgcaaagcctgacgattattgaggcaacacttcttgcggcgatggttcctggctcttcgatcgtgctgcggattttgcgtgagagtattgccagtatttgcggatcctacggtcattcagc

SEQ ID NO: 1239 - DNA, 158 bp, synthetic construct
  misc_feature 1..158: note = Synthetic nucleic acid
  source 1..158: mol_type = other DNA
cagacgacggccagtgtcgacatgacattactcgcttcgctgcgcgactggcttaaggcgcaaaacacttcttgcggcgatggttcctggctcttcgatcccatgccgaaaacagtgttgctcacgggagaggcatcaggatcctacggtcattcagc

SEQ ID NO: 1240 - DNA, 158 bp, synthetic construct
  misc_feature 1..158: note = Synthetic nucleic acid
  source 1..158: mol_type = other DNA
cagacgacggccagtgtcgacatgatgaaaacgatgcgtattgctgcgatcccgggagaaacacttcttgcggcgatggttcctggctcttcgatcccacaggttgccgacgcgatttgcaaaattattttgcgtctaggatcctacggtcattcagc

SEQ ID NO: 1241 - DNA, 158 bp, synthetic construct
  misc_feature 1..158: note = Synthetic nucleic acid
  source 1..158: mol_type = other DNA
cagacgacggccagtgtcgacatggaaagtggtcatcgctttgatgctcagacgctgcacaaacacttcttgcggcgatggttcctggctcttcgatcagagacgttgcaggctttctgtcagcagttagccagcaaaggatcctacggtcattcagc

SEQ ID NO: 1242 - DNA, 158 bp, synthetic construct
  misc_feature 1..158: note = Synthetic nucleic acid
  source 1..158: mol_type = other DNA
cagacgacggccagtgtcgacatggctggaaacacaattggacaactctttcgcgtaaccaaacacttcttgcggcgatggttcctggctcttcgatcgcaaaatgccgatgtgaagactgatattccacgctggtgcggatcctacggtcattcagc

SEQ ID NO: 1243 - DNA, 158 bp, synthetic construct
  misc_feature 1..158: note = Synthetic nucleic acid
  source 1..158: mol_type = other DNA
cagacgacggccagtgtcgacatgttcaagcgtcgttatgtaacattgcttcccctttttgtgttgcttgccaacacttcttgcggcgatggttcctggctcttcgatcaagccgtggcgctggcgcgagtacagaaaggatcctacggtcattcagc

SEQ ID NO: 1244 - DNA, 158 bp, synthetic construct
  misc_feature 1..158: note = Synthetic nucleic acid
  source 1..158: mol_type = other DNA
cagacgacggccagtgtcgacgtgaaaatacttgttactggtggcgcaggatttattggttcagctaacacttcttgcggcgatggttcctggctcttcgatccgtggattgaacagaactatgagggccgccagaagggatcctacggtcattcagc

SEQ ID NO: 1245 - DNA, 158 bp, synthetic construct
  misc_feature 1..158: note = Synthetic nucleic acid
  source 1..158: mol_type = other DNA
cagacgacggccagtgtcgacatgaagccttctatcgttgccaaactggaagccctgcatgaacgccataacacttcttgcggcgatggttcctggctcttcgatcaccaactggcggcgttgtccgagcaggaaaacggatcctacggtcattcagc

SEQ ID NO: 1246 - DNA, 158 bp, synthetic construct
  misc_feature 1..158: note = Synthetic nucleic acid
  source 1..158: mol_type = other DNA
cagacgacggccagtgtcgacatgcaaccttttggcgtacttgaccgctatatcggtaaaaaacacttcttgcggcgatggttcctggctcttcgatccttcttaatcagcctgtggctgttaatgagaaaatcgtgcggatcctacggtcattcagc

SEQ ID NO: 1247 - DNA, 158 bp, synthetic construct
  misc_feature 1..158: note = Synthetic nucleic acid
  source 1..158: mol_type = other DNA
cagacgacggccagtgtcgacatgttagtttggctggccgaacatttggtcaaatattattccggaacacttcttgcggcgatggttcctggctcttcgatcgttctgattggtctggcaacgctgaaggtacgtcaaggatcctacggtcattcagc

SEQ ID NO: 1248 - DNA, 158 bp, synthetic construct
  misc_feature 1..158: note = Synthetic nucleic acid
  source 1..158: mol_type = other DNA
cagacgacggccagtgtcgacgtgaaaccagtaacgttatacgatgtcgcagagtatgccggtgtctcttataacacttcttgcggcgatggttcctggctcttcgatcaggtttcccgactggaaagcgggcagcaaggatcctacggtcattcagc

SEQ ID NO: 1249 - DNA, 158 bp, synthetic construct
  misc_feature 1..158: note = Synthetic nucleic acid
  source 1..158: mol_type = other DNA
cagacgacggccagtgtcgacatgaaaaaatatctcgcgctggctttgattgcgccgttgctcataacacttcttgcggcgatggttcctggctcttcgatcgtgaataccgcgcaaaaatcctaccgccgccgatcaggatcctacggtcattcagc

SEQ ID NO: 1250 - DNA, 158 bp, synthetic construct
  misc_feature 1..158: note = Synthetic nucleic acid
  source 1..158: mol_type = other DNA
cagacgacggccagtgtcgacatgaaaatagcgtttatcggcgaagctgtttctggatttggcaacacttcttgcggcgatggttcctggctcttcgatcataaggtaattatttctgctatttcccggaggaaaataggatcctacggtcattcagc

SEQ ID NO: 1251 - DNA, 158 bp, synthetic construct
  misc_feature 1..158: note = Synthetic nucleic acid
  source 1..158: mol_type = other DNA
cagacgacggccagtgtcgacatgaatgagttggtgcagatcctgaaaaatacccgtcagcatttaataacacttcttgcggcgatggttcctggctcttcgatcgacgacctggatttggattttgaaattaatgcaggatcctacggtcattcagc

SEQ ID NO: 1252 - DNA, 158 bp, synthetic construct
  misc_feature 1..158: note = Synthetic nucleic acid
  source 1..158: mol_type = other DNA
cagacgacggccagtgtcgacatgactgtactgattcacgtactgggatcggatatccctcaccataaccgaacaacacttcttgcggcgatggttcctggctcttcgatcgcgattgccgccagggaggtcgcaaaaggatcctacggtcattcagc

SEQ ID NO: 1253 - DNA, 158 bp, synthetic construct
  misc_feature 1..158: note = Synthetic nucleic acid
  source 1..158: mol_type = other DNA
cagacgacggccagtgtcgacatgcaaatacttgccgatttactgaatacgatcccagccataacacttcttgcggcgatggttcctggctcttcgatcgttctaccggggaatacgacttctgatttgaacagtcaaggatcctacggtcattcagc

SEQ ID NO: 1254 - DNA, 158 bp, synthetic construct
  misc_feature 1..158: note = Synthetic nucleic acid
  source 1..158: mol_type = other DNA
cagacgacggccagtgtcgacatgcaagcggcaactgttgtgattaaccgccgcgaacacttcttgcggcgatggttcctggctcttcgatctattacgcgcctgacttcaagggtcgcgatgaaatacgtggatacgggatcctacggtcattcagc

SEQ ID NO: 1255 - DNA, 158 bp, synthetic construct
  misc_feature 1..158: note = Synthetic nucleic acid
  source 1..158: mol_type = other DNA
cagacgacggccagtgtcgacatgtctaagatttttgatttcgtaaaacctggcgtaatcactggtgatgaaacacttcttgcggcgatggttcctggctcttcgatccaggaactgaacgcgatcgacgttctgaggggatcctacggtcattcagc

SEQ ID NO: 1256 - DNA, 158 bp, synthetic construct
  misc_feature 1..158: note = Synthetic nucleic acid
  source 1..158: mol_type = other DNA
cagacgacggccagtgtcgacatgaaagcactggctcggtttggcaaggcctttaacacttcttgcggcgatggttcctggctcttcgatcataaaaccgcaatcaaagtgatcatgacttacgactttgatgaatggggatcctacggtcattcagc

SEQ ID NO: 1257 - DNA, 158 bp, synthetic construct
  misc_feature 1..158: note = Synthetic nucleic acid
  source 1..158: mol_type = other DNA
cagacgacggccagtgtcgacatgaaattgacgctgaaaaaccttagcatggcgatcatgatgaaacacttcttgcggcgatggttcctggctcttcgatcccctgataaggcagtaaaatttcttaataaagaggtcggatcctacggtcattcagc

SEQ ID NO: 1258 - DNA, 158 bp, synthetic construct
  misc_feature 1..158: note = Synthetic nucleic acid
  source 1..158: mol_type = other DNA
cagacgacggccagtgtcgacatgaaacaaaaagagctatggattaaccagatcaaagggttatgtatttgtctggtaacacttcttgcggcgatggttcctggctcttcgatcgctgccgtcagttactcccgcattggatcctacggtcattcagc

SEQ ID NO: 1259 - DNA, 158 bp, synthetic construct
  misc_feature 1..158: note = Synthetic nucleic acid
  source 1..158: mol_type = other DNA
cagacgacggccagtgtcgacatggcagagaataaaagaacccgctggcagcggcaacacttcttgcggcgatggttcctggctcttcgatcattgtaccgacgcttaattccacaagcgccaatgattggtcacagaggatcctacggtcattcagc

SEQ ID NO: 1260 - DNA, 158 bp, synthetic construct
  misc_feature 1..158: note = Synthetic nucleic acid
  source 1..158: mol_type = other DNA
cagacgacggccagtgtcgacatgtccctcacccgcttgttgatccgcgatttaacacttcttgcggcgatggttcctggctcttcgatcgaaaattcgaagatgtttaccgtggaaaagggtaaaataacggatgatggatcctacggtcattcagc

SEQ ID NO: 1261 - DNA, 158 bp, synthetic construct
  misc_feature 1..158: note = Synthetic nucleic acid
  source 1..158: mol_type = other DNA
cagacgacggccagtgtcgacgtggggcagcgaatacctgtaacgcttggtaatattgcgcaacacttcttgcggcgatggttcctggctcttcgatcggcgaacgacccgacatttaacaatgaggatctggctgctggatcctacggtcattcagc

SEQ ID NO: 1262 - DNA, 158 bp, synthetic construct
  misc_feature 1..158: note = Synthetic nucleic acid
  source 1..158: mol_type = other DNA
cagacgacggccagtgtcgacatgaaaaaattgatcaatgatgtgcaagacgtactggacgaacaactggaacacttcttgcggcgatggttcctggctcttcgatcccacaccccggcccttaactggggtaaacctggatcctacggtcattcagc

SEQ ID NO: 1263 - DNA, 158 bp, synthetic construct
  misc_feature 1..158: note = Synthetic nucleic acid
  source 1..158: mol_type = other DNA
cagacgacggccagtgtcgacatgaaattaatcactgcaccatgcagagcattacttgctctgcaacacttcttgcggcgatggttcctggctcttcgatccgaccaaatcttcctgatgcaatatttctactggtcaggatcctacggtcattcagc

SEQ ID NO: 1264 - DNA, 158 bp, synthetic construct
  misc_feature 1..158: note = Synthetic nucleic acid
  source 1..158: mol_type = other DNA
cagacgacggccagtgtcgacatgaacattgagttactgcaacagttgtgcgaagccagcgaacacttcttgcggcgatggttcctggctcttcgatcgaaagtcaacgcgtttagccagttccgtcaggtggattcaggatcctacggtcattcagc

SEQ ID NO: 1265 - DNA, 158 bp, synthetic construct
  misc_feature 1..158: note = Synthetic nucleic acid
  source 1..158: mol_type = other DNA
cagacgacggccagtgtcgacatgacaacgtttcattccttaacagtggcaaaagtcgagtcggaaacaacacttcttgcggcgatggttcctggctcttcgatcgtggttgactttgacgcgaaggggatggcaactggatcctacggtcattcagc

SEQ ID NO: 1266 - DNA, 158 bp, synthetic construct
  misc_feature 1..158: note = Synthetic nucleic acid
  source 1..158: mol_type = other DNA
cagacgacggccagtgtcgacatgacccgtccgatacaggccagcctcgatctgcaggcattaaaacaaacacttcttgcggcgatggttcctggctcttcgatcctggcgctacgcgtcccggttgtgacggtgattggatcctacggtcattcagc

SEQ ID NO: 1267 - DNA, 158 bp, synthetic construct
  misc_feature 1..158: note = Synthetic nucleic acid
  source 1..158: mol_type = other DNA
cagacgacggccagtgtcgacatgagcaccgtgactattaccgatttagcgcgtgaaaacgtccgaacacttcttgcggcgatggttcctggctcttcgatccgcgtcattgacgccttacgtgcggagcaagttgagggatcctacggtcattcagc

SEQ ID NO: 1268 - DNA, 158 bp, synthetic construct
  misc_feature 1..158: note = Synthetic nucleic acid
  source 1..158: mol_type = other DNA
cagacgacggccagtgtcgacatgcaaaaagacgcgctgaataacgtacatattaccgacgaacaggttttaatgaaacacttcttgcggcgatggttcctggctcttcgatcgcagctgacggctcgcgtggctacaggatcctacggtcattcagc

SEQ ID NO: 1269 - DNA, 158 bp, synthetic construct
  misc_feature 1..158: note = Synthetic nucleic acid
  source 1..158: mol_type = other DNA
cagacgacggccagtgtcgacatgcgcgttaccgatttctcctttgaattgcccgaatccctaacacttcttgcggcgatggttcctggctcttcgatctacaatccgcaggcaattaatgagcgcgtcggggagacaggatcctacggtcattcagc

SEQ ID NO: 1270 - DNA, 158 bp, synthetic construct
  misc_feature 1..158: note = Synthetic nucleic acid
  source 1..158: mol_type = other DNA
cagacgacggccagtgtcgacatggcaggactgaaattacaggcagtaaccaaaagctggaacacttcttgcggcgatggttcctggctcttcgatcagctgcatctttttgatggtgaaacaggacaacgagtacaaggatcctacggtcattcagc

SEQ ID NO: 1271 - DNA, 158 bp, synthetic construct
  misc_feature 1..158: note = Synthetic nucleic acid
  source 1..158: mol_type = other DNA
cagacgacggccagtgtcgacttgacacgtctaaccctggcgttagatgtcatgggaggggattttggaacacttcttgcggcgatggttcctggctcttcgatcctggacggtggcaaaagcggaactctgcgggacggatcctacggtcattcagc

SEQ ID NO: 1272 - DNA, 158 bp, synthetic construct
  misc_feature 1..158: note = Synthetic nucleic acid
  source 1..158: mol_type = other DNA
cagacgacggccagtgtcgacatgaaacaggtttgcgtcctcggtaacgggcagttaggccgtataacacttcttgcggcgatggttcctggctcttcgatcagcggcgtgatttgggcgcagagtaagttcggtcacggatcctacggtcattcagc

SEQ ID NO: 1273 - DNA, 158 bp, synthetic construct
  misc_feature 1..158: note = Synthetic nucleic acid
  source 1..158: mol_type = other DNA
cagacgacggccagtgtcgacatgagaaaaattctgataacaggtggtgccgggtttattggctcaacacttcttgcggcgatggttcctggctcttcgatcagctatcagggcgagcgtttaggtctgaaaggcccgggatcctacggtcattcagc

SEQ ID NO: 1274 - DNA, 158 bp, synthetic construct
  misc_feature 1..158: note = Synthetic nucleic acid
  source 1..158: mol_type = other DNA
cagacgacggccagtgtcgacatgagtcagaagtatctttttatcgatcgcgatggaaccctgattagcaacacttcttgcggcgatggttcctggctcttcgatcataccctgccctcgtcgaaaggagtgctgaagggatcctacggtcattcagc

SEQ ID NO: 1275 - DNA, 158 bp, synthetic construct
  misc_feature 1..158: note = Synthetic nucleic acid
  source 1..158: mol_type = other DNA
cagacgacggccagtgtcgacatgagtggtcaaggaaagcgattaatggtgatggcaggcggaaccggtaacacttcttgcggcgatggttcctggctcttcgatccaaatgaagtgagccgggttgcccgggcggacggatcctacggtcattcagc

SEQ ID NO: 1276 - DNA, 158 bp, synthetic construct
  misc_feature 1..158: note = Synthetic nucleic acid
  source 1..158: mol_type = other DNA
cagacgacggccagtgtcgacatggataagagtaagcgccatctggcgtggtgggttgtcgggttaaacacttcttgcggcgatggttcctggctcttcgatcggcctgacgacctcgtggtgaggttgccgcaagaaggatcctacggtcattcagc

SEQ ID NO: 1277 - DNA, 158 bp, synthetic construct
  misc_feature 1..158: note = Synthetic nucleic acid
  source 1..158: mol_type = other DNA
cagacgacggccagtgtcgacatgtttgtgaagctcttacgttccgttgcgattggattaattgtaacacttcttgcggcgatggttcctggctcttcgatccaggtcaccattcaggaatatccggcaaccaattgcggatcctacggtcattcagc

SEQ ID NO: 1278 - DNA, 158 bp, synthetic construct
  misc_feature 1..158: note = Synthetic nucleic acid
  source 1..158: mol_type = other DNA
cagacgacggccagtgtcgacttggcgggttttaacatcaaacattggtttgcagatggcaacacttcttgcggcgatggttcctggctcttcgatctgtttggcgttaagtatctcgaagcgtatgacctgattactggatcctacggtcattcagc

SEQ ID NO: 1279 - DNA, 158 bp, synthetic construct
  misc_feature 1..158: note = Synthetic nucleic acid
  source 1..158: mol_type = other DNA
cagacgacggccagtgtcgacatgaaaaaagccacatgcttaactgacgatcaacgctggcaatctgtaacacttcttgcggcgatggttcctggctcttcgatcctgcgccgcgaagctgaaaatgaggagagggccggatcctacggtcattcagc

SEQ ID NO: 1280 - DNA, 158 bp, synthetic construct
  misc_feature 1..158: note = Synthetic nucleic acid
  source 1..158: mol_type = other DNA
cagacgacggccagtgtcgacatgaccgaacttaaaaacgatcgttatctgcgggcgctgctaacacttcttgcggcgatggttcctggctcttcgatcgaggcagtgcatcgactgtctgaacagtatcaccgcctgggatcctacggtcattcagc

SEQ ID NO: 1281 - DNA, 158 bp, synthetic construct
  misc_feature 1..158: note = Synthetic nucleic acid
  source 1..158: mol_type = other DNA
cagacgacggccagtgtcgacatggaacatttcgacgtggcgattattggcctcggcaacacttcttgcggcgatggttcctggctcttcgatcttatgcgcagtggtgtggcacatattccacagttgaaggatcggggatcctacggtcattcagc

SEQ ID NO: 1282 - DNA, 158 bp, synthetic construct
  misc_feature 1..158: note = Synthetic nucleic acid
  source 1..158: mol_type = other DNA
cagacgacggccagtgtcgacatggctgatcaaaataatccgtgggataccacgccagcggcaacacttcttgcggcgatggttcctggctcttcgatcggccctgttggtctgctgacccgcccattcattaaggagggatcctacggtcattcagc

SEQ ID NO: 1283 - DNA, 158 bp, synthetic construct
  misc_feature 1..158: note = Synthetic nucleic acid
  source 1..158: mol_type = other DNA
cagacgacggccagtgtcgacatggtaacgtcctgtactggacatgttttagataatcaacgcgccaaacacttcttgcggcgatggttcctggctcttcgatcactttgccaacgtacgctgcatgcctacagtaagggatcctacggtcattcagc

SEQ ID NO: 1284 - DNA, 158 bp, synthetic construct
  misc_feature 1..158: note = Synthetic nucleic acid
  source 1..158: mol_type = other DNA
cagacgacggccagtgtcgacatgtacgttgccgtgaaagggggcgagaaggcgataacacttcttgcggcgatggttcctggctcttcgatcctggagctactcaaacgtctgcaacaggagcagaaccatggcaatggatcctacggtcattcagc

SEQ ID NO: 1285 - DNA, 158 bp, synthetic construct
  misc_feature 1..158: note = Synthetic nucleic acid
  source 1..158: mol_type = other DNA
cagacgacggccagtgtcgacatgaaaacgatgctggcagcttatttaccaggaaattcgaccaacacttcttgcggcgatggttcctggctcttcgatcgcaaatgcgggaaagttgtgattaacttcccggatttaggatcctacggtcattcagc

SEQ ID NO: 1286 - DNA, 158 bp, synthetic construct
  misc_feature 1..158: note = Synthetic nucleic acid
  source 1..158: mol_type = other DNA
cagacgacggccagtgtcgacatgaccgaaccgttaaaaccacgtattgatttcgacggtcctctaacacttcttgcggcgatggttcctggctcttcgatcacgctgcaaaaaggcaaaacgcccagcgaaaaatgcggatcctacggtcattcagc

SEQ ID NO: 1287 - DNA, 158 bp, synthetic construct
  misc_feature 1..158: note = Synthetic nucleic acid
  source 1..158: mol_type = other DNA
cagacgacggccagtgtcgacatgagtgctggcaagggattgttgctcgtcataacacttcttgcggcgatggttcctggctcttcgatcgctggccccttcgatacagtggtgctttttaagattaactataacttcggatcctacggtcattcagc

SEQ ID NO: 1288 - DNA, 158 bp, synthetic construct
  misc_feature 1..158: note = Synthetic nucleic acid
  source 1..158: mol_type = other DNA
cagacgacggccagtgtcgacatgcatttacgtcatctgttttcatcgcgcctgcgtggttaacacttcttgcggcgatggttcctggctcttcgatcagctacccagccagacgatgtgattcgtattgcgctgctgggatcctacggtcattcagc

SEQ ID NO: 1289 - DNA, 158 bp, synthetic construct
  misc_feature 1..158: note = Synthetic nucleic acid
  source 1..158: mol_type = other DNA
cagacgacggccagtgtcgacatgctcgaaatgttgatgcaatggtatcgccgccgttttagcgaccaacacttcttgcggcgatggttcctggctcttcgatctgcctggcccgatgggcaaatcgcgcaagaagaaggatcctacggtcattcagc

SEQ ID NO: 1290 - DNA, 158 bp, synthetic construct
  misc_feature 1..158: note = Synthetic nucleic acid
  source 1..158: mol_type = other DNA
cagacgacggccagtgtcgacatggctatcgacgaaaacaaacagaaagcgttggcgaacacttcttgcggcgatggttcctggctcttcgatctagatgatagcgaaggcgtagcagaaactaacgaagattttttcggatcctacggtcattcagc

SEQ ID NO: 1291 - DNA, 158 bp, synthetic construct
  misc_feature 1..158: note = Synthetic nucleic acid
  source 1..158: mol_type = other DNA
cagacgacggccagtgtcgacatgaataagcgcgatgcaatcaatcatattcggcagtttggcaacacttcttgcggcgatggttcctggctcttcgatcccacggtacaacatttacgccactttacgcctgaagtcggatcctacggtcattcagc

SEQ ID NO: 1292 - DNA, 158 bp, synthetic construct
  misc_feature 1..158: note = Synthetic nucleic acid
  source 1..158: mol_type = other DNA
cagacgacggccagtgtcgacatgctaccatctatttcaatcaacaataccagcgcagcttaccaacacttcttgcggcgatggttcctggctcttcgatcaccatctgcgccaggtgttaattttgatgatatttggggatcctacggtcattcagc

SEQ ID NO: 1293 - DNA, 158 bp, synthetic construct
  misc_feature 1..158: note = Synthetic nucleic acid
  source 1..158: mol_type = other DNA
cagacgacggccagtgtcgacatgctggaactgaatttttcccagacgttgggcaaccattaacacttcttgcggcgatggttcctggctcttcgatcgctgtacgcgcaaattaaaagtgtgtcgataaccgccggtggatcctacggtcattcagc

SEQ ID NO: 1294 - DNA, 158 bp, synthetic construct
  misc_feature 1..158: note = Synthetic nucleic acid
  source 1..158: mol_type = other DNA
cagacgacggccagtgtcgacatggtattcagaatagctagctccccttatacccataaccagcgccagacataacacttcttgcggcgatggttcctggctcttcgatcgcgcgtctacggccatcgcaaagggatcggatcctacggtcattcagc

SEQ ID NO: 1295 - DNA, 158 bp, synthetic construct
  misc_feature 1..158: note = Synthetic nucleic acid
  source 1..158: mol_type = other DNA
cagacgacggccagtgtcgacatgttcggcaatgatattttcacccgcgtaaaacgttcagaaaataaaaaaataacacttcttgcggcgatggttcctggctcttcgatcgcagctcgtcaaaagacccccgcaactggatcctacggtcattcagc

SEQ ID NO: 1296 - DNA, 158 bp, synthetic construct
  misc_feature 1..158: note = Synthetic nucleic acid
  source 1..158: mol_type = other DNA
cagacgacggccagtgtcgacatgttttcaatgatattaagcgggctaatttgtggtgctctgctgggatttaacacttcttgcggcgatggttcctggctcttcgatccgcgactggcaactgctgcggcaaatttcggatcctacggtcattcagc

SEQ ID NO: 1297 - DNA, 158 bp, synthetic construct
  misc_feature 1..158: note = Synthetic nucleic acid
  source 1..158: mol_type = other DNA
cagacgacggccagtgtcgacgtgcgtgccgataagtcattaagcccgtttgaaatccgggtataaacacttcttgcggcgatggttcctggctcttcgatcctatcgaatctgatttgccgggccttgcgcaaagtaggatcctacggtcattcagc

SEQ ID NO: 1298 - DNA, 158 bp, synthetic construct
  misc_feature 1..158: note = Synthetic nucleic acid
  source 1..158: mol_type = other DNA
cagacgacggccagtgtcgacatgaaaaagagcactctggcattagtggtgatgggcattaacacttcttgcggcgatggttcctggctcttcgatcatgatgatattgtcgcggttggcatgacgtatcagtttaagggatcctacggtcattcagc

SEQ ID NO: 1299 - DNA, 158 bp, synthetic construct
  misc_feature 1..158: note = Synthetic nucleic acid
  source 1..158: mol_type = other DNA
cagacgacggccagtgtcgacatgcgtaaaatcattcatgtggatatggactgctttttcgccgaacacttcttgcggcgatggttcctggctcttcgatccccgcaaatggaaagacaactggtgctgggattacttggatcctacggtcattcagc

SEQ ID NO: 1300 - DNA, 158 bp, synthetic construct
  misc_feature 1..158: note = Synthetic nucleic acid
  source 1..158: mol_type = other DNA
cagacgacggccagtgtcgacatggaaataagctttacccgcgtggcactgctgaacacttcttgcggcgatggttcctggctcttcgatcggatgtcaccacagtttaaaagcttccttgtcagcgaaaaaaatgaaggatcctacggtcattcagc

SEQ ID NO: 1301 - DNA, 158 bp, synthetic construct
  misc_feature 1..158: note = Synthetic nucleic acid
  source 1..158: mol_type = other DNA
cagacgacggccagtgtcgacgtgaaaagtgcaatgacaagctctccgctgcgggtcaacacttcttgcggcgatggttcctggctcttcgatccgttgtatcaatccgcagaaacagggacgcgtgtggaattagtgggatcctacggtcattcagc

SEQ ID NO: 1302 - DNA, 158 bp, synthetic construct
  misc_feature 1..158: note = Synthetic nucleic acid
  source 1..158: mol_type = other DNA
cagacgacggccagtgtcgacatgaaaaaaataccctgcgtgatgatgcgaggtggaacaacacttcttgcggcgatggttcctggctcttcgatcacgaccagaaaaatattttccggtgaagtttatcttccctgcggatcctacggtcattcagc

SEQ ID NO: 1303 - DNA, 158 bp, synthetic construct
  misc_feature 1..158: note = Synthetic nucleic acid
  source 1..158: mol_type = other DNA
cagacgacggccagtgtcgacatgaaaaagacccgtacagccaatttgcaccatctttatcatgaacccttaccaacacttcttgcggcgatggttcctggctcttcgatccatcagcggatgcgggagtgggggtccggatcctacggtcattcagc

SEQ ID NO: 1304 - DNA, 158 bp, synthetic construct
  misc_feature 1..158: note = Synthetic nucleic acid
  source 1..158: mol_type = other DNA
cagacgacggccagtgtcgacatgaaaaagttagtagccacagcaccgcgtgttgctgcaacacttcttgcggcgatggttcctggctcttcgatccagcatccggaacagagcatcaaaatgggcgttacgtttggtggatcctacggtcattcagc

SEQ ID NO: 1305 - DNA, 158 bp, synthetic construct
  misc_feature 1..158: note = Synthetic nucleic acid
  source 1..158: mol_type = other DNA
cagacgacggccagtgtcgacatgaattatcagaacgacgatttacgcatcaaagaaatcaaagagttacttcctcctaacacttcttgcggcgatggttcctggctcttcgatccagtaaaagcgcgtcgcggggttggatcctacggtcattcagc

SEQ ID NO: 1306 - DNA, 158 bp, synthetic construct
  misc_feature 1..158: note = Synthetic nucleic acid
  source 1..158: mol_type = other DNA
cagacgacggccagtgtcgacatgacagatattgcgcagttgcttggcaaagacgccaacacttcttgcggcgatggttcctggctcttcgatcccgtgcaggacgtttatctcgatagcaaaattactatcgccttcggatcctacggtcattcagc

SEQ ID NO: 1307 - DNA, 158 bp, synthetic construct
  misc_feature 1..158: note = Synthetic nucleic acid
  source 1..158: mol_type = other DNA
cagacgacggccagtgtcgacatgaggtttttattgggcgtgctgatgctgatgatctccggctaacacttcttgcggcgatggttcctggctcttcgatcggcgatgcaacatttgtcgccgcaggagagtaaagccggatcctacggtcattcagc

SEQ ID NO: 1308 - DNA, 158 bp, synthetic construct
  misc_feature 1..158: note = Synthetic nucleic acid
  source 1..158: mol_type = other DNA
cagacgacggccagtgtcgacatgcaagcgtcgcaattttcagcccaggttctggactggtacaacacttcttgcggcgatggttcctggctcttcgatcgtttgttacagcagttacgcactggcgcgccggttaggggatcctacggtcattcagc

SEQ ID NO: 1309 - DNA, 158 bp, synthetic construct
  misc_feature 1..158: note = Synthetic nucleic acid
  source 1..158: mol_type = other DNA
cagacgacggccagtgtcgacatgccagtgttacacaaccgcatttccaacgacgcaacacttcttgcggcgatggttcctggctcttcgatcggacgtctgaatacaacactgtgcattcctgatccaacagaaaagggatcctacggtcattcagc

SEQ ID NO: 1310 - DNA, 158 bp, synthetic construct
  misc_feature 1..158: note = Synthetic nucleic acid
  source 1..158: mol_type = other DNA
cagacgacggccagtgtcgacatgctacgcgagtgtgattacagccaggcgctgctggagcaaacacttcttgcggcgatggttcctggctcttcgatcggcgtgtttaaccccggtcgcatgtacgcggaacttccaggatcctacggtcattcagc

SEQ ID NO: 1311 - DNA, 158 bp, synthetic construct
  misc_feature 1..158: note = Synthetic nucleic acid
  source 1..158: mol_type = other DNA
cagacgacggccagtgtcgacttgagtaaaaataaactctccaaaggccagcagcgccaacacttcttgcggcgatggttcctggctcttcgatcgcaggtaaaaacgcgtaaaaacttttctgatacggatgaccctggatcctacggtcattcagc

SEQ ID NO: 1312 - DNA, 158 bp, synthetic construct
  misc_feature 1..158: note = Synthetic nucleic acid
  source 1..158: mol_type = other DNA
cagacgacggccagtgtcgacatgaaaatcagtcgggaaacactccaccagctaattgagaataaactaacacttcttgcggcgatggttcctggctcttcgatctcatacgaaacgaaaaatccctttgcgcaattcggatcctacggtcattcagc

SEQ ID NO: 1313 - DNA, 158 bp, synthetic construct
  misc_feature 1..158: note = Synthetic nucleic acid
  source 1..158: mol_type = other DNA
cagacgacggccagtgtcgacatgaagatcaaagctgttggtgcatattccgctaaacaaccaaacacttcttgcggcgatggttcctggctcttcgatcatcgttttgttatcgataatcgcacactaacagaccaaggatcctacggtcattcagc

SEQ ID NO: 1314 - DNA, 158 bp, synthetic construct
  misc_feature 1..158: note = Synthetic nucleic acid
  source 1..158: mol_type = other DNA
cagacgacggccagtgtcgacatgacgaatatcaccttacagaaacaacatcgtacactgtggcattttattcaacacttcttgcggcgatggttcctggctcttcgatcctatgtgattcaaagcgtcatcgcagacggatcctacggtcattcagc

SEQ ID NO: 1315 - DNA, 158 bp, synthetic construct
  misc_feature 1..158: note = Synthetic nucleic acid
  source 1..158: mol_type = other DNA
cagacgacggccagtgtcgacatgagcaaaatcagggtgttatctgtcgatgattcggcactaacacttcttgcggcgatggttcctggctcttcgatcttggcaaaaattagtgccggacaggcgatacgtattcaaggatcctacggtcattcagc

SEQ ID NO: 1316 - DNA, 158 bp, synthetic construct
  misc_feature 1..158: note = Synthetic nucleic acid
  source 1..158: mol_type = other DNA
cagacgacggccagtgtcgacatgattgagtttgataatctcacttacctccacggtaaaccgcaaaacacttcttgcggcgatggttcctggctcttcgatcacacaacaggtgattatgcgcatattgctgagctgggatcctacggtcattcagc

SEQ ID NO: 1317 - DNA, 158 bp, synthetic construct
  misc_feature 1..158: note = Synthetic nucleic acid
  source 1..158: mol_type = other DNA
cagacgacggccagtgtcgacatggaaacccctcaacccgataaaacgggcatgcacattctgctcaaaacacttcttgcggcgatggttcctggctcttcgatcccgggcagaccgaaaagtcggttaccgggagaaggatcctacggtcattcagc

SEQ ID NO: 1318 - DNA, 158 bp, synthetic construct
  misc_feature 1..158: note = Synthetic nucleic acid
  source 1..158: mol_type = other DNA
cagacgacggccagtgtcgacatggcaacaggcacgcagcccgatgctgggcaaacacttcttgcggcgatggttcctggctcttcgatctggccagggcataccgagttctcggtttacctgcctatcaggaaaccgggatcctacggtcattcagc

SEQ ID NO: 1319 - DNA, 158 bp, synthetic construct
  misc_feature 1..158: note = Synthetic nucleic acid
  source 1..158: mol_type = other DNA
cagacgacggccagtgtcgacgtgcgggtattacttagacctgttctggtgcctgagcttgggctggtaacacttcttgcggcgatggttcctggctcttcgatcgatcgcgcgctggcaattggcgtactggcgcttggatcctacggtcattcagc

SEQ ID NO: 1320 - DNA, 158 bp, synthetic construct
  misc_feature 1..158: note = Synthetic nucleic acid
  source 1..158: mol_type = other DNA
cagacgacggccagtgtcgacgtggaattgttgtctgaatatggtttgtttttggcgaaaatcgttaccgttaacacttcttgcggcgatggttcctggctcttcgatcggcagcggggtcaaaagccattgatgcacggatcctacggtcattcagc

SEQ ID NO: 1321 - DNA, 158 bp, synthetic construct
  misc_feature 1..158: note = Synthetic nucleic acid
  source 1..158: mol_type = other DNA
cagacgacggccagtgtcgacatgaaaaaatggtcacgccacctgctcgcggcaacacttcttgcggcgatggttcctggctcttcgatcagcagcatttatgaagagtattatcagaagctgaaagcaggacgtactggatcctacggtcattcagc

SEQ ID NO: 1322 - DNA, 158 bp, synthetic construct
  misc_feature 1..158: note = Synthetic nucleic acid
  source 1..158: mol_type = other DNA
cagacgacggccagtgtcgacatgaaaatactggtgatcggcccgtcttgggttggcaacacttcttgcggcgatggttcctggctcttcgatctactggaagaactcaacgcgctattgttacaagaggaagcctttggatcctacggtcattcagc

SEQ ID NO: 1323 - DNA, 158 bp, synthetic construct
  misc_feature 1..158: note = Synthetic nucleic acid
  source 1..158: mol_type = other DNA
cagacgacggccagtgtcgacatgaacagaactgacgaactccgtactgcgcgtattgagagcaacacttcttgcggcgatggttcctggctcttcgatctcgaaaaactcgcctctgcggtagatacccgcttcgatggatcctacggtcattcagc

SEQ ID NO: 1324 - DNA, 158 bp, synthetic construct
  misc_feature 1..158: note = Synthetic nucleic acid
  source 1..158: mol_type = other DNA
cagacgacggccagtgtcgacatgacacaaccaatgcctgggaaaccggccgaagacgctgaaaataacacttcttgcggcgatggttcctggctcttcgatcctggtgtcgcattaacccgccgttgctcgaaaggatcctacggtcattcagccgc

SEQ ID NO: 1325 - DNA, 158 bp, synthetic construct
  misc_feature 1..158: note = Synthetic nucleic acid
  source 1..158: mol_type = other DNA
cagacgacggccagtgtcgacatgacgcaatttaatcccgttgatcatccacatcgccgctaaacacttcttgcggcgatggttcctggctcttcgatcgcagtcagcgatatccattttcgcgaatccggagtgtcgggatcctacggtcattcagc

SEQ ID NO: 1326 - DNA, 158 bp, synthetic construct
  misc_feature 1..158: note = Synthetic nucleic acid
  source 1..158: mol_type = other DNA
cagacgacggccagtgtcgacatgactcagaaaaatttcgttgaactgcgcaacgtcactaaacgatttggaacacttcttgcggcgatggttcctggctcttcgatcggcatgtttgttctggcggatgcggcagcgggatcctacggtcattcagc

SEQ ID NO: 1327 - DNA, 158 bp, synthetic construct
  misc_feature 1..158: note = Synthetic nucleic acid
  source 1..158: mol_type = other DNA
cagacgacggccagtgtcgacatgactgcaccatcccaggtattaaagatccgccgcccagaaacacttcttgcggcgatggttcctggctcttcgatcctcgccggggaaacggtacgctggtccgttaaacaagacggatcctacggtcattcagc

SEQ ID NO: 1328 - DNA, 158 bp, synthetic construct
  misc_feature 1..158: note = Synthetic nucleic acid
  source 1..158: mol_type = other DNA
cagacgacggccagtgtcgacatgccagttttgcagtggggaatgttatgtgtgctatcacttctcctttctattaacacttcttgcggcgatggttcctggctcttcgatccctatgcgccgaagcggtcggcccaaggatcctacggtcattcagc

SEQ ID NO: 1329 - DNA, 158 bp, synthetic construct
  misc_feature 1..158: note = Synthetic nucleic acid
  source 1..158: mol_type = other DNA
cagacgacggccagtgtcgacatggagtttttcaaaaagacggcacttgccgcactggttataacacttcttgcggcgatggttcctggctcttcgatcgatccgcagcagatccagcagatcttcaatcagtacagaggatcctacggtcattcagc

SEQ ID NO: 1330 - DNA, 158 bp, synthetic construct
  misc_feature 1..158: note = Synthetic nucleic acid
  source 1..158: mol_type = other DNA
cagacgacggccagtgtcgacatgaaaaattcaaaagcaatattgcaggtgccgggcacaataacacttcttgcggcgatggttcctggctcttcgatccgcgacattattaaaggcgttattaaaattagcgattctggatcctacggtcattcagc

SEQ ID NO: 1331 - DNA, 158 bp, synthetic construct
  misc_feature 1..158: note = Synthetic nucleic acid
  source 1..158: mol_type = other DNA
cagacgacggccagtgtcgacatgagcgagaactcgattcgtttgacccaatacagccacggagctggttaacacttcttgcggcgatggttcctggctcttcgatccggcggtcgtgccatggttgagattcgttttggatcctacggtcattcagc

SEQ ID NO: 1332 - DNA, 158 bp, synthetic construct
  misc_feature 1..158: note = Synthetic nucleic acid
  source 1..158: mol_type = other DNA
cagacgacggccagtgtcgacatgagcgtaatgtttgatccagacacggcgatttatcctttccaacacttcttgcggcgatggttcctggctcttcgatctcgtatgctggattttgcggctacactacgtggatcaggatcctacggtcattcagc

SEQ ID NO: 1333 - DNA, 158 bp, synthetic construct
  misc_feature 1..158: note = Synthetic nucleic acid
  source 1..158: mol_type = other DNA
cagacgacggccagtgtcgacatgcgctatcgcattttccttctcttttttttcgctttgttgccgacgtctttaacacttcttgcggcgatggttcctggctcttcgatctggcccacgttgtggatcacccgtgagggatcctacggtcattcagc

SEQ ID NO: 1334 - DNA, 158 bp, synthetic construct
  misc_feature 1..158: note = Synthetic nucleic acid
  source 1..158: mol_type = other DNA
cagacgacggccagtgtcgacatgcgtattgaagaagatctgaagttaggttttaaagacgttctcatccgcaacacttcttgcggcgatggttcctggctcttcgatcaagaaaaccgcatcttcaacaacctgggatcctacggtcattcagccgc

SEQ ID NO: 1335 - DNA, 158 bp, synthetic construct
  misc_feature 1..158: note = Synthetic nucleic acid
  source 1..158: mol_type = other DNA
cagacgacggccagtgtcgacatgttgaaaaaatttcgtggcatgttttccaatgacttgtccattgacctggaacacttcttgcggcgatggttcctggctcttcgatccggcggcgacctgttcagcgaagagttaggatcctacggtcattcagc

SEQ ID NO: 1336 - DNA, 158 bp, synthetic construct
  misc_feature 1..158: note = Synthetic nucleic acid
  source 1..158: mol_type = other DNA
cagacgacggccagtgtcgacatgaaaaagacagctatcgcgattgcagtggcactggaacacttcttgcggcgatggttcctggctcttcgatcagttaaaggtatcaaagacgttgtaactcagccgcaggctgcaggatcctacggtcattcagc

SEQ ID NO: 1337 - DNA, 158 bp, synthetic construct
  misc_feature 1..158: note = Synthetic nucleic acid
  source 1..158: mol_type = other DNA
cagacgacggccagtgtcgacatgaaagttatgcgtaccaccgtcgcaactgttgtcaacacttcttgcggcgatggttcctggctcttcgatcggaagaccaatattaaagacagtagcggtaagccgctgtacaagggatcctacggtcattcagc

SEQ ID NO: 1338 - DNA, 158 bp, synthetic construct
  misc_feature 1..158: note = Synthetic nucleic acid
  source 1..158: mol_type = other DNA
cagacgacggccagtgtcgacatgaaatcagtggtgaatgatactgatggtatcgtgcgcgttaacacttcttgcggcgatggttcctggctcttcgatcgtaatgctatgccgggcaaagtgttgctcattcccctcggatcctacggtcattcagc

SEQ ID NO: 1339 - DNA, 158 bp, synthetic construct
  misc_feature 1..158: note = Synthetic nucleic acid
  source 1..158: mol_type = other DNA
cagacgacggccagtgtcgacatgactggtcagtcttcatctcaggcggcaacgcccattcagtgaacacttcttgcggcgatggttcctggctcttcgatcggtgtgattgtcggcgggctggcgctgttgttctccggatcctacggtcattcagc

SEQ ID NO: 1340 - DNA, 158 bp, synthetic construct
  misc_feature 1..158: note = Synthetic nucleic acid
  source 1..158: mol_type = other DNA
cagacgacggccagtgtcgacatgagcgacaacatccgtgttgggttgattgggtatggttatgcgaaacacttcttgcggcgatggttcctggctcttcgatccgccaaacatcgcgcgactttgtgccttgcacgtggatcctacggtcattcagc

SEQ ID NO: 1341 - DNA, 158 bp, synthetic construct
  misc_feature 1..158: note = Synthetic nucleic acid
  source 1..158: mol_type = other DNA
cagacgacggccagtgtcgacatgatcaccattcgtgatgtagcgcgtcaggctggcgtaacacttcttgcggcgatggttcctggctcttcgatcaatgcggcggcgatcactaactcaacaaatcaggcgatgataggatcctacggtcattcagc

SEQ ID NO: 1342 - DNA, 158 bp, synthetic construct
  misc_feature 1..158: note = Synthetic nucleic acid
  source 1..158: mol_type = other DNA
cagacgacggccagtgtcgacatgcaatatcaccgtataccccacagttcgctggaagtcaaacacttcttgcggcgatggttcctggctcttcgatctgaagcggtgcatcaggtttatacttatccggcaccaggtggatcctacggtcattcagc

SEQ ID NO: 1343 - DNA, 158 bp, synthetic construct
  misc_feature 1..158: note = Synthetic nucleic acid
  source 1..158: mol_type = other DNA
cagacgacggccagtgtcgacatggctcaccgcccacgctggacattgtcgcaaaacacttcttgcggcgatggttcctggctcttcgatctgatgaccccggacaccgacgaatattacaacgcggcagcattagaaggatcctacggtcattcagc

SEQ ID NO: 1344 - DNA, 158 bp, synthetic construct
  misc_feature 1..158: note = Synthetic nucleic acid
  source 1..158: mol_type = other DNA
cagacgacggccagtgtcgacatggtctggttagcgaatcccgaacgttacgggcagatgcaataaacacttcttgcggcgatggttcctggctcttcgatcgagctgaatctgtggcaggcgtcttccgataaaattggatcctacggtcattcagc

SEQ ID NO: 1345 - DNA, 158 bp, synthetic construct
  misc_feature 1..158: note = Synthetic nucleic acid
  source 1..158: mol_type = other DNA
cagacgacggccagtgtcgacgtgctgaacgaaactcccgcactggcacccgataacacttcttgcggcgatggttcctggctcttcgatcgcgaagagtattccagcctgacggaatatcagtttattgctgaggtcggatcctacggtcattcagc

SEQ ID NO: 1346 - DNA, 158 bp, synthetic construct
  misc_feature 1..158: note = Synthetic nucleic acid
  source 1..158: mol_type = other DNA
cagacgacggccagtgtcgacttgaacatagacactcgcgaaatcaccctggagccagcagaaacacttcttgcggcgatggttcctggctcttcgatcgcagcagaacgcaagcgcgaagaacaggaacaaaaacgaggatcctacggtcattcagc

SEQ ID NO: 1347 - DNA, 158 bp, synthetic construct
  misc_feature 1..158: note = Synthetic nucleic acid
  source 1..158: mol_type = other DNA
cagacgacggccagtgtcgacatgaacgatgaaatgaaaggtaaaagcggcaaggtcaaagtgataacacttcttgcggcgatggttcctggctcttcgatcttgcttggtgaatggtggcgtcagaataaagcccctggatcctacggtcattcagc

SEQ ID NO: 1348 - DNA, 158 bp, synthetic construct
  misc_feature 1..158: note = Synthetic nucleic acid
  source 1..158: mol_type = other DNA
cagacgacggccagtgtcgacatgcacggtaattctgaaatgcaaaaaatcaaccaaaccagcgcaatgcaacacttcttgcggcgatggttcctggctcttcgatccgcgctcaaactggtggcggataagcgtgcaggatcctacggtcattcagc

SEQ ID NO: 1349 - DNA, 158 bp, synthetic construct
  misc_feature 1..158: note = Synthetic nucleic acid
  source 1..158: mol_type = other DNA
cagacgacggccagtgtcgacatggatttatcgctattaaaagcgttgagcgaggcagatgcgataacacttcttgcggcgatggttcctggctcttcgatccgtgagacggttgttcaactgacggatttcagagatggatcctacggtcattcagc

SEQ ID NO: 1350 - DNA, 158 bp, synthetic construct
  misc_feature 1..158: note = Synthetic nucleic acid
  source 1..158: mol_type = other DNA
cagacgacggccagtgtcgacatggggcaacaaaagcagcgtaatcgacgttgggttctggcctaacacttcttgcggcgatggttcctggctcttcgatccggcaaagtggtgatccgcgtggcgggtgatgattgtggatcctacggtcattcagc

SEQ ID NO: 1351 - DNA, 158 bp, synthetic construct
  misc_feature 1..158: note = Synthetic nucleic acid
  source 1..158: mol_type = other DNA
cagacgacggccagtgtcgacatggtcatcaactgcgcctttattggcttcggcaaaagcaaacacttcttgcggcgatggttcctggctcttcgatctgagcaagcctctccctccacagtaactctcgctaagcagggatcctacggtcattcagc

SEQ ID NO: 1352 - DNA, 158 bp, synthetic construct
  misc_feature 1..158: note = Synthetic nucleic acid
  source 1..158: mol_type = other DNA
cagacgacggccagtgtcgacatgttttccgcattgcgccaccgtaccgctgccctaacacttcttgcggcgatggttcctggctcttcgatccggataatgctacctctggtgaaggagttggcgaaggcgtctaacggatcctacggtcattcagc

SEQ ID NO: 1353 - DNA, 158 bp, synthetic construct
  misc_feature 1..158: note = Synthetic nucleic acid
  source 1..158: mol_type = other DNA
cagacgacggccagtgtcgacgtgaccgataaaacctctcttagctacaaagatgccggtgttgatattaacacttcttgcggcgatggttcctggctcttcgatcctgattccgaacaacgcgtggttatcgaattaggatcctacggtcattcagc

SEQ ID NO: 1354 - DNA, 158 bp, synthetic construct
  misc_feature 1..158: note = Synthetic nucleic acid
  source 1..158: mol_type = other DNA
cagacgacggccagtgtcgacatgagtaacgcgattacgatggggatattttggcatttgatcggcgaacacttcttgcggcgatggttcctggctcttcgatccgctaacatcgtcggcatcggcatggcgaatgggggatcctacggtcattcagc

SEQ ID NO: 1355 - DNA, 158 bp, synthetic construct
  misc_feature 1..158: note = Synthetic nucleic acid
  source 1..158: mol_type = other DNA
cagacgacggccagtgtcgacatgatggtcatccgtcccgttgagcgatcagatgtctcggcgaacacttcttgcggcgatggttcctggctcttcgatcgtctggtgcgcctgtgcgcagaggagaaaacagcagaaggatcctacggtcattcagc

SEQ ID NO: 1356 - DNA, 158 bp, synthetic construct
  misc_feature 1..158: note = Synthetic nucleic acid
  source 1..158: mol_type = other DNA
cagacgacggccagtgtcgacatgcgatatcatggggatatgttattaactactcctgtcatcagtacgctaacacttcttgcggcgatggttcctggctcttcgatcccttcagctgacaggaatgcacaattaattggatcctacggtcattcagc

SEQ ID NO: 1357 - DNA, 158 bp, synthetic construct
  misc_feature 1..158: note = Synthetic nucleic acid
  source 1..158: mol_type = other DNA
cagacgacggccagtgtcgacatggcaaagccgatcatcacgctcaatggcctaaaaataacacttcttgcggcgatggttcctggctcttcgatccaaagcatcgccgttctgttaagcgatctcaataaagaggttggatcctacggtcattcagc

SEQ ID NO: 1358 - DNA, 158 bp, synthetic construct
  misc_feature 1..158: note = Synthetic nucleic acid
  source 1..158: mol_type = other DNA
cagacgacggccagtgtcgacatggcttactctgttcaaaagtcgcgcctggcaaaggttgcaacacttcttgcggcgatggttcctggctcttcgatcgcgctggtagctgtcttccaggctgcgtttagcaagttcggatcctacggtcattcagc

SEQ ID NO: 1359 - DNA, 158 bp, synthetic construct
  misc_feature 1..158: note = Synthetic nucleic acid
  source 1..158: mol_type = other DNA
cagacgacggccagtgtcgacatgataaaactttcgaatatcaccaaagtgttccaccagggcacaacacttcttgcggcgatggttcctggctcttcgatccaccatgtaaaagtagaggtactgggttatgtcggatcctacggtcattcagccgc

SEQ ID NO: 1360 - DNA, 158 bp, synthetic construct
  misc_feature 1..158: note = Synthetic nucleic acid
  source 1..158: mol_type = other DNA
cagacgacggccagtgtcgacatgatcgctgaactgtttacaaataatgcgcttaatctggtcattattttcggtaaacacttcttgcggcgatggttcctggctcttcgatctacaccgccggaacagggtcgcggaggatcctacggtcattcagc

SEQ ID NO: 1361 - DNA, 158 bp, synthetic construct
  misc_feature 1..158: note = Synthetic nucleic acid
  source 1..158: mol_type = other DNA
cagacgacggccagtgtcgacatgattcggttgtacccggaacaactccgcgcgcaaacacttcttgcggcgatggttcctggctcttcgatcctgttgtgccataaacccctggcggacgtatttatcgacggtgccggatcctacggtcattcagc

SEQ ID NO: 1362 - DNA, 158 bp, synthetic construct
  misc_feature 1..158: note = Synthetic nucleic acid
  source 1..158: mol_type = other DNA
cagacgacggccagtgtcgacatgcaagtgaaaacacagtcctgcgttgttgcgggcaaaacacttcttgcggcgatggttcctggctcttcgatcggtgataaaacccaggcagcaaaagtccagcttgttttcaagggatcctacggtcattcagc

SEQ ID NO: 1363 - DNA, 158 bp, synthetic construct
  misc_feature 1..158: note = Synthetic nucleic acid
  source 1..158: mol_type = other DNA
cagacgacggccagtgtcgacatggaaagtacgccgaaaaaagctcctcgcagtaaattccctgctctaacacttcttgcggcgatggttcctggctcttcgatcgcttcggcagtcgctaatcttgagccgcaagaaggatcctacggtcattcagc

SEQ ID NO: 1364 - DNA, 158 bp, synthetic construct
  misc_feature 1..158: note = Synthetic nucleic acid
  source 1..158: mol_type = other DNA
cagacgacggccagtgtcgacatggcgaccataaaggatgtagcccgactggcaggcgtttcaaacacttcttgcggcgatggttcctggctcttcgatccgtcgctggaggcaagtcatcatgcaaccagcgacacaggatcctacggtcattcagc

SEQ ID NO: 1365 - DNA, 158 bp, synthetic construct
  misc_feature 1..158: note = Synthetic nucleic acid
  source 1..158: mol_type = other DNA
cagacgacggccagtgtcgacatgtctgcatttaccccggcaagtgaagtcttgctgcgtcaaacacttcttgcggcgatggttcctggctcttcgatctatcgcgccattatgacccgccaggcgaagaaaggttacggatcctacggtcattcagc

SEQ ID NO: 1366 - DNA, 158 bp, synthetic construct
  misc_feature 1..158: note = Synthetic nucleic acid
  source 1..158: mol_type = other DNA
cagacgacggccagtgtcgacatgaaccactccttaaaaccctggaacacatttggcattgataacacttcttgcggcgatggttcctggctcttcgatccatcaggtgaagtgagcgcagtggagacaatttcaaccggatcctacggtcattcagc

SEQ ID NO: 1367 - DNA, 158 bp, synthetic construct
  misc_feature 1..158: note = Synthetic nucleic acid
  source 1..158: mol_type = other DNA
cagacgacggccagtgtcgacatgcgcgtactgctatttttacttctttcccttttcatgttgccaacacttcttgcggcgatggttcctggctcttcgatctatttttatcagcacacatcagcggctaagaaatacggatcctacggtcattcagc

SEQ ID NO: 1368 - DNA, 158 bp, synthetic construct
  misc_feature 1..158: note = Synthetic nucleic acid
  source 1..158: mol_type = other DNA
cagacgacggccagtgtcgacatgctgaagtttattcagaacaaccgtgaaatcacggcactgctggaacacttcttgcggcgatggttcctggctcttcgatccgcttcgtcaggtaaaaaacgggaggccgcaattggatcctacggtcattcagc

SEQ ID NO: 1369 - DNA, 158 bp, synthetic construct
  misc_feature 1..158: note = Synthetic nucleic acid
  source 1..158: mol_type = other DNA
cagacgacggccagtgtcgacatggcgcatattgtaaccctaaataccccatccagagaagattggttaacaacacttcttgcggcgatggttcctggctcttcgatcccgctggatctccagctacgccagcagtccggatcctacggtcattcagc

SEQ ID NO: 1370 - DNA, 158 bp, synthetic construct
  misc_feature 1..158: note = Synthetic nucleic acid
  source 1..158: mol_type = other DNA
cagacgacggccagtgtcgacatggctaccgccaaaaaaataaccattcatgatgttgcgctaacacttcttgcggcgatggttcctggctcttcgatcaatcttattattcccgcccggctcattgcagcgaaattcggatcctacggtcattcagc

SEQ ID NO: 1371 - DNA, 158 bp, synthetic construct
  misc_feature 1..158: note = Synthetic nucleic acid
  source 1..158: mol_type = other DNA
cagacgacggccagtgtcgacatgaaagcgttatccaaactgaaagcggaagagggcatctggataacacttcttgcggcgatggttcctggctcttcgatcggccagtccgggaaagttattctgagctgggatggtggatcctacggtcattcagc

SEQ ID NO: 1372 - DNA, 158 bp, synthetic construct
  misc_feature 1..158: note = Synthetic nucleic acid
  source 1..158: mol_type = other DNA
cagacgacggccagtgtcgacatgccttcaattcgactggctgatttagcgcagcagttaacacttcttgcggcgatggttcctggctcttcgatccgtctgaaatcgcttgagcgcaaggttaatcaacaagactctggatcctacggtcattcagc

SEQ ID NO: 1373 - DNA, 158 bp, synthetic construct
  misc_feature 1..158: note = Synthetic nucleic acid
  source 1..158: mol_type = other DNA
cagacgacggccagtgtcgacatggcaacaataaaagatgtagcgaaacgagcaaacgtttccactacaactaacacttcttgcggcgatggttcctggctcttcgatcacggcccgttccgcgactatcgtcgtccaggatcctacggtcattcagc

SEQ ID NO: 1374 - DNA, 158 bp, synthetic construct
  misc_feature 1..158: note = Synthetic nucleic acid
  source 1..158: mol_type = other DNA
cagacgacggccagtgtcgacatgtcgcgactcagccccgtcaatcaggcccgttgaacacttcttgcggcgatggttcctggctcttcgatcggtgaagccgtccgcgacgcatttgatcctaataaggcggtgcgtggatcctacggtcattcagc

SEQ ID NO: 1375 - DNA, 158 bp, synthetic construct
  misc_feature 1..158: note = Synthetic nucleic acid
  source 1..158: mol_type = other DNA
cagacgacggccagtgtcgacgtgaaagcgaagaagcaggaaactgccgcgaccatgaaagaaacacttcttgcggcgatggttcctggctcttcgatcgaacttatcatccggggatcaacacgcgcgttacctaacggatcctacggtcattcagc

SEQ ID NO: 1376 - DNA, 158 bp, synthetic construct
  misc_feature 1..158: note = Synthetic nucleic acid
  source 1..158: mol_type = other DNA
cagacgacggccagtgtcgacgtgatgcctcaatctcttccggacaccactacgcaacacttcttgcggcgatggttcctggctcttcgatcctttatcagtctgattaaaggagtacgtagccgtgataaaacgctaggatcctacggtcattcagc

SEQ ID NO: 1377 - DNA, 158 bp, synthetic construct
  misc_feature 1..158: note = Synthetic nucleic acid
  source 1..158: mol_type = other DNA
cagacgacggccagtgtcgacgtgggtccagtaatgttggatgtcgaaggttacgaactggaaacacttcttgcggcgatggttcctggctcttcgatcttacatgaacgctggcaggaagagaaagcaggtcacgcaggatcctacggtcattcagc

SEQ ID NO: 1378 - DNA, 158 bp, synthetic construct
  misc_feature 1..158: note = Synthetic nucleic acid
  source 1..158: mol_type = other DNA
cagacgacggccagtgtcgacgtgtcagatcagattatcgcccgcgtctcgcaatcccttaacacttcttgcggcgatggttcctggctcttcgatcagaaaacaccttttgtcgcgcatccagcgctacattccggtggatcctacggtcattcagc

SEQ ID NO: 1379 - DNA, 158 bp, synthetic construct
  misc_feature 1..158: note = Synthetic nucleic acid
  source 1..158: mol_type = other DNA
cagacgacggccagtgtcgacatgacacttcatcgctttaagaaaatcgccttacttagcgctaacacttcttgcggcgatggttcctggctcttcgatctattcaacaaagagaatatcggcaaatacgatttccggggatcctacggtcattcagc

SEQ ID NO: 1380 - DNA, 158 bp, synthetic construct
  misc_feature 1..158: note = Synthetic nucleic acid
  source 1..158: mol_type = other DNA
cagacgacggccagtgtcgacatggcgcagataacgacgaccgatgccaatgaattaacacttcttgcggcgatggttcctggctcttcgatcattcctgactggttaacaacgtatctggaggcgaaatcatgtttgggatcctacggtcattcagc

SEQ ID NO: 1381 - DNA, 158 bp, synthetic construct
  misc_feature 1..158: note = Synthetic nucleic acid
  source 1..158: mol_type = other DNA
cagacgacggccagtgtcgacatgttggatattgataaaagcaccgtggactttctggtcaccgaaaatataacacttcttgcggcgatggttcctggctcttcgatccgctattacggtggtctggtggaatatttgggatcctacggtcattcagc

SEQ ID NO: 1382 - DNA, 158 bp, synthetic construct
  misc_feature 1..158: note = Synthetic nucleic acid
  source 1..158: mol_type = other DNA
cagacgacggccagtgtcgacatgtttcagcagcaaaaagactgggaaacaagagaaaacgcgtttaacacttcttgcggcgatggttcctggctcttcgatcactcacccagcggaaaccgctctacagaggttggcggatcctacggtcattcagc

SEQ ID NO: 1383 - DNA, 158 bp, synthetic construct
  misc_feature 1..158: note = Synthetic nucleic acid
  source 1..158: mol_type = other DNA
cagacgacggccagtgtcgacgtgaccttctggagtattttacgccaacgctgctgggggctaacacttcttgcggcgatggttcctggctcttcgatctggattgatccgcgtatcggacgtggaggtggtgaaacaggatcctacggtcattcagc

SEQ ID NO: 1384 - DNA, 158 bp, synthetic construct
  misc_feature 1..158: note = Synthetic nucleic acid
  source 1..158: mol_type = other DNA
cagacgacggccagtgtcgacatgaaccaacgtaatgcttcaatgactgtgatcggtgccggctcgtacgaacacttcttgcggcgatggttcctggctcttcgatctgcacgcaaggacgagcgcagcagccacccgggatcctacggtcattcagc

SEQ ID NO: 1385 - DNA, 158 bp, synthetic construct
  misc_feature 1..158: note = Synthetic nucleic acid
  source 1..158: mol_type = other DNA
cagacgacggccagtgtcgacatgaccgtacgcgtagcgataaatggcttcggtcgcataacacttcttgcggcgatggttcctggctcttcgatcctcgacacgacgttagctatggctactgttgctttcagggatggatcctacggtcattcagc

SEQ ID NO: 1386 - DNA, 158 bp, synthetic construct
  misc_feature 1..158: note = Synthetic nucleic acid
  source 1..158: mol_type = other DNA
cagacgacggccagtgtcgacatgtcgatgataaaaagctatgccgcaaaagaagcgggcggcgaaaacacttcttgcggcgatggttcctggctcttcgatccgcgttaccgcgtggtgttgaaagccgattttcacggatcctacggtcattcagc

SEQ ID NO: 1387 - DNA, 158 bp, synthetic construct
  misc_feature 1..158: note = Synthetic nucleic acid
  source 1..158: mol_type = other DNA
cagacgacggccagtgtcgacatgttgcagtttattctccgacgtttgggactcgtcatcccaacacttcttgcggcgatggttcctggctcttcgatctacggcgtggtgaacccgcgtattcgtcataagaaggctggatcctacggtcattcagc

SEQ ID NO: 1388 - DNA, 158 bp, synthetic construct
  misc_feature 1..158: note = Synthetic nucleic acid
  source 1..158: mol_type = other DNA
cagacgacggccagtgtcgacatgaaaaggatgattgcgctggatggcgcacaggaacacttcttgcggcgatggttcctggctcttcgatctagtttgatagaaacagatggcgtaacgcgggtgagcattgaaaaaggatcctacggtcattcagc

SEQ ID NO: 1389 - DNA, 158 bp, synthetic construct
  misc_feature 1..158: note = Synthetic nucleic acid
  source 1..158: mol_type = other DNA
cagacgacggccagtgtcgacatgaacgctaagataattgcctcgctggccttcaccagcataacacttcttgcggcgatggttcctggctcttcgatcctaagcgcgatgagttcggtgagtaaagcggtgcaggcgggatcctacggtcattcagc

SEQ ID NO: 1390 - DNA, 158 bp, synthetic construct
  misc_feature 1..158: note = Synthetic nucleic acid
  source 1..158: mol_type = other DNA
cagacgacggccagtgtcgacatgagagttctggttaccggtggtagcggttacattggaagtcataaacacttcttgcggcgatggttcctggctcttcgatcgcagtcacgccatccacagggatatcccgatgatggatcctacggtcattcagc

SEQ ID NO: 1391 - DNA, 158 bp, synthetic construct
  misc_feature 1..158: note = Synthetic nucleic acid
  source 1..158: mol_type = other DNA
cagacgacggccagtgtcgacatgattattgaacgttgtcgtgaactggcgttgcgagcaacacttcttgcggcgatggttcctggctcttcgatcgaagtgaaccgcgaaagcagtttacaaacactggttgaactgggatcctacggtcattcagc

SEQ ID NO: 1392 - DNA, 158 bp, synthetic construct
  misc_feature 1..158: note = Synthetic nucleic acid
  source 1..158: mol_type = other DNA
cagacgacggccagtgtcgacatgcaaaagaaatcaatttacgttgcctacacgggcgggaccatcgggataacacttcttgcggcgatggttcctggctcttcgatcctgcgcggcgaactgacgccggatgataacggatcctacggtcattcagc

SEQ ID NO: 1393 - DNA, 158 bp, synthetic construct
  misc_feature 1..158: note = Synthetic nucleic acid
  source 1..158: mol_type = other DNA
cagacgacggccagtgtcgacatggccgttaacttactgaaaaagaactcactcgcgctggtcgaacacttcttgcggcgatggttcctggctcttcgatccgagttagacaagctgttagcggcggggcgtaacccaggatcctacggtcattcagc

SEQ ID NO: 1394 - DNA, 158 bp, synthetic construct
  misc_feature 1..158: note = Synthetic nucleic acid
  source 1..158: mol_type = other DNA
cagacgacggccagtgtcgacatgtccacattacgcctgctcatctctgactcttacgacccgtaacacttcttgcggcgatggttcctggctcttcgatcggagttatcggcatggatggcgggggctgtaaggagcggatcctacggtcattcagc

SEQ ID NO: 1395 - DNA, 158 bp, synthetic construct
  misc_feature 1..158: note = Synthetic nucleic acid
  source 1..158: mol_type = other DNA
cagacgacggccagtgtcgacatgtttgtcatctggagccatagaacagggttcatcatgagtaacacttcttgcggcgatggttcctggctcttcgatccggaccaaatgatacgtcagtgggagagatctcacactggatcctacggtcattcagc

SEQ ID NO: 1396 - DNA, 158 bp, synthetic construct
  misc_feature 1..158: note = Synthetic nucleic acid
  source 1..158: mol_type = other DNA
cagacgacggccagtgtcgacatgtttgtcatctggagccatagaacagggttcatcatgagtaacacttcttgcggcgatggttcctggctcttcgatccggaccaaatgatacgtcagtgggagagatctcacgacggatcctacggtcattcagc

SEQ ID NO: 1397 - DNA, 158 bp, synthetic construct
  misc_feature 1..158: note = Synthetic nucleic acid
  source 1..158: mol_type = other DNA
cagacgacggccagtgtcgacatgtttgtcatctggagccatagaacagggttcatcatgagtaacacttcttgcggcgatggttcctggctcttcgatccggaccaaatgatacgtcagtgggagagatctcacagaggatcctacggtcattcagc

SEQ ID NO: 1398 - DNA, 158 bp, synthetic construct
  misc_feature 1..158: note = Synthetic nucleic acid
  source 1..158: mol_type = other DNA
cagacgacggccagtgtcgacatgtttgtcatctggagccatagaacagggttcatcatgagtaacacttcttgcggcgatggttcctggctcttcgatccggaccaaatgatacgtcagtgggagagatctcacacaggatcctacggtcattcagc

SEQ ID NO: 1399 - DNA, 158 bp, synthetic construct
  misc_feature 1..158: note = Synthetic nucleic acid
  source 1..158: mol_type = other DNA
cagacgacggccagtgtcgacatgtttgtcatctggagccatagaacagggttcatcatgagtaacacttcttgcggcgatggttcctggctcttcgatccggaccaaatgatacgtcagtgggagagatctcacacgggatcctacggtcattcagc

SEQ ID NO: 1400 - DNA, 158 bp, synthetic construct
  misc_feature 1..158: note = Synthetic nucleic acid
  source 1..158: mol_type = other DNA
cagacgacggccagtgtcgacatgtttgtcatctggagccatagaacagggttcatcatgagtaacacttcttgcggcgatggttcctggctcttcgatccggaccaaatgatacgtcagtgggagagatctcacggtggatcctacggtcattcagc

SEQ ID NO: 1401 - DNA, 158 bp, synthetic construct
  misc_feature 1..158: note = Synthetic nucleic acid
  source 1..158: mol_type = other DNA
cagacgacggccagtgtcgacatgtttgtcatctggagccatagaacagggttcatcatgagtaacacttcttgcggcgatggttcctggctcttcgatccggaccaaatgatacgtcagtgggagagatctcaccctggatcctacggtcattcagc

SEQ ID NO: 1402 - DNA, 158 bp, synthetic construct
  misc_feature 1..158: note = Synthetic nucleic acid
  source 1..158: mol_type = other DNA
cagacgacggccagtgtcgacatgtttgtcatctggagccatagaacagggttcatcatgagtaacacttcttgcggcgatggttcctggctcttcgatccggaccaaatgatacgtcagtgggagagatctcaccttggatcctacggtcattcagc

SEQ ID NO: 1403 - DNA, 158 bp, synthetic construct
  misc_feature 1..158: note = Synthetic nucleic acid
  source 1..158: mol_type = other DNA
cagacgacggccagtgtcgacatgtttgtcatctggagccatagaacagggttcatcatgagtaacacttcttgcggcgatggttcctggctcttcgatccggaccaaatgatacgtcagtgggagagatctcacgtaggatcctacggtcattcagc

SEQ ID NO: 1404 - DNA, 158 bp, synthetic construct
  misc_feature 1..158: note = Synthetic nucleic acid
  source 1..158: mol_type = other DNA
cagacgacggccagtgtcgacatgtttgtcatctggagccatggaacagggttcatcatgagtaacacttcttgcggcgatggttcctggctcttcgatccggaccaaatgatacgtcagtgggagagatctcacctgggatcctacggtcattcagc

SEQ ID NO: 1405 - DNA, 158 bp, synthetic construct
  misc_feature 1..158: note = Synthetic nucleic acid
  source 1..158: mol_type = other DNA
cagacgacggccagtgtcgacatgaacggtaaaaaactttatatctcggacgtcacattgcgtgacggtataacacttcttgcggcgatggttcctggctcttcgatcgtggcgctggatctgcgcaacaacaaatgcggatcctacggtcattcagc

SEQ ID NO: 1406 - DNA, 158 bp, synthetic construct
  misc_feature 1..158: note = Synthetic nucleic acid
  source 1..158: mol_type = other DNA
cagacgacggccagtgtcgacatgaaggtactggttaccggcgccaccagcggcttaggtcgaaacaacacttcttgcggcgatggttcctggctcttcgatccctggctacgcgaccacggaaaactgccgcgcttaggatcctacggtcattcagc

SEQ ID NO: 1407 - DNA, 158 bp, synthetic construct
  misc_feature 1..158: note = Synthetic nucleic acid
  source 1..158: mol_type = other DNA
cagacgacggccagtgtcgacatgaatactgaagccacgcacgaccaaaatgaagcacttactaccggaacacttcttgcggcgatggttcctggctcttcgatcaccctcaatgccgaacaatcaccggcgcaggagggatcctacggtcattcagc

SEQ ID NO: 1408 - DNA, 158 bp, synthetic construct
  misc_feature 1..158: note = Synthetic nucleic acid
  source 1..158: mol_type = other DNA
cagacgacggccagtgtcgacatgacgcagccattggtcggaaaacagattctcattgttgaagataacacttcttgcggcgatggttcctggctcttcgatcgtggtcgactgcgcttgatgttgtctgcagaacgaggatcctacggtcattcagc

SEQ ID NO: 1409 - DNA, 158 bp, synthetic construct
  misc_feature 1..158: note = Synthetic nucleic acid
  source 1..158: mol_type = other DNA
cagacgacggccagtgtcgacatgacgcaggaaaacgagatcaaacgtcccatccaggatctggagcacgaaacacttcttgcggcgatggttcctggctcttcgatcccgcgaatgccggggaaaacgcagccttggggatcctacggtcattcagc

SEQ ID NO: 1410 - DNA, 158 bp, synthetic construct
  misc_feature 1..158: note = Synthetic nucleic acid
  source 1..158: mol_type = other DNA
cagacgacggccagtgtcgacatgacgtacgcagtggagtttgacaacgtctcgcggttgtacgaacacttcttgcggcgatggttcctggctcttcgatcgcgtgatgtgatggtgccgctggttgaggagagggttggatcctacggtcattcagc

SEQ ID NO: 1411 - DNA, 158 bp, synthetic construct
  misc_feature 1..158: note = Synthetic nucleic acid
  source 1..158: mol_type = other DNA
cagacgacggccagtgtcgacatgagcgtaattgaaactgcaactgtgccgctcgcacaaaacacttcttgcggcgatggttcctggctcttcgatcgtctgcgtgcttgctttaaaccggtggaggaactgttagttggatcctacggtcattcagc

SEQ ID NO: 1412 - DNA, 158 bp, synthetic construct
  misc_feature 1..158: note = Synthetic nucleic acid
  source 1..158: mol_type = other DNA
cagacgacggccagtgtcgacatgcgtgtactgggtattgaaacttcctgcgatgaaaccggcatcgccatttaaacacttcttgcggcgatggttcctggctcttcgatcccgctggcggagttaccggctgcggggggatcctacggtcattcagc

SEQ ID NO: 1413 - DNA, 158 bp, synthetic construct
  misc_feature 1..158: note = Synthetic nucleic acid
  source 1..158: mol_type = other DNA
cagacgacggccagtgtcgacatgtctgaaggctggaacattgccgtcctgggcaacacttcttgcggcgatggttcctggctcttcgatctggcagtaaaaatcgccgagaaactggtgcaggagtatctgtaccgtggatcctacggtcattcagc

SEQ ID NO: 1414 - DNA, 158 bp, synthetic construct
  misc_feature 1..158: note = Synthetic nucleic acid
  source 1..158: mol_type = other DNA
cagacgacggccagtgtcgacatgaaggctgcagttgttacgaaggatcatcatgttgacgttacgtataaaaaacacttcttgcggcgatggttcctggctcttcgatcccgcatggtgattgatttccgtcaccatggatcctacggtcattcagc

SEQ ID NO: 1415 - DNA, 158 bp, synthetic construct
  misc_feature 1..158: note = Synthetic nucleic acid
  source 1..158: mol_type = other DNA
cagacgacggccagtgtcgacatgacgacgatgctggaagtggcgaagcgcgccggaacacttcttgcggcgatggttcctggctcttcgatcggaaaactgatccgccgcgactcactcattgctccttcgcgagagggatcctacggtcattcagc

SEQ ID NO: 1416 - DNA, 158 bp, synthetic construct
  misc_feature 1..158: note = Synthetic nucleic acid
  source 1..158: mol_type = other DNA
cagacgacggccagtgtcgacatgagacgagaacttgccatcgaattttcccgcgtcaccgaataacacttcttgcggcgatggttcctggctcttcgatctcgcaaagacccggaaatgcaggtgcacatcctcgtgggatcctacggtcattcagc

SEQ ID NO: 1417 - DNA, 158 bp, synthetic construct
  misc_feature 1..158: note = Synthetic nucleic acid
  source 1..158: mol_type = other DNA
cagacgacggccagtgtcgacatgattgaagcagaccgtctgatttctgccggtaccactttgcaacacttcttgcggcgatggttcctggctcttcgatcgaatcactttggcataacgccgccagaaatgccggtaggatcctacggtcattcagc

SEQ ID NO: 1418 - DNA, 158 bp, synthetic construct
  misc_feature 1..158: note = Synthetic nucleic acid
  source 1..158: mol_type = other DNA
cagacgacggccagtgtcgacatgtactaccccttcgttcgtaaagcccttttccagctaacacttcttgcggcgatggttcctggctcttcgatcaaaggtccgccgctgattaaagaaatcgttacccatatctcgggatcctacggtcattcagc

SEQ ID NO: 1419 - DNA, 158 bp, synthetic construct
  misc_feature 1..158: note = Synthetic nucleic acid
  source 1..158: mol_type = other DNA
cagacgacggccagtgtcgacgtgaataatatccaactcgcccacggtagcggcggccaaacacttcttgcggcgatggttcctggctcttcgatcctcgatttaccacacgccgaaccgcttccgcgtatatgcttaggatcctacggtcattcagc

SEQ ID NO: 1420 - DNA, 158 bp, synthetic construct
  misc_feature 1..158: note = Synthetic nucleic acid
  source 1..158: mol_type = other DNA
cagacgacggccagtgtcgacatgactgataaaaccattgcgttttcgctactcgatctggcaacacttcttgcggcgatggttcctggctcttcgatcgagctggcgatggatgttaaggaagagttgttgggaataggatcctacggtcattcagc

SEQ ID NO: 1421 - DNA, 158 bp, synthetic construct
  misc_feature 1..158: note = Synthetic nucleic acid
  source 1..158: mol_type = other DNA
cagacgacggccagtgtcgacatgagtctggatatcaaccagattgctctgcaccagcttatcaagcgtgatgaaacacttcttgcggcgatggttcctggctcttcgatccagcgccggacgtctggcggcaattacggatcctacggtcattcagc

SEQ ID NO: 1422 - DNA, 158 bp, synthetic construct
  misc_feature 1..158: note = Synthetic nucleic acid
  source 1..158: mol_type = other DNA
cagacgacggccagtgtcgacgtgaaaaagcaatggattgttggcacggcactgcttatgttgataacacttcttgcggcgatggttcctggctcttcgatcaccgaacaactgcggcgcaatggggtgattaaggtaggatcctacggtcattcagc

SEQ ID NO: 1423 - DNA, 158 bp, synthetic construct
  misc_feature 1..158: note = Synthetic nucleic acid
  source 1..158: mol_type = other DNA
cagacgacggccagtgtcgacatgaaaacagaacgtattctcggtgctctttatgggcaggcgttaaacacttcttgcggcgatggttcctggctcttcgatctggcgaaatatcgtcaacaacgggaggcggtacaaggatcctacggtcattcagc

SEQ ID NO: 1424 - DNA, 158 bp, synthetic construct
  misc_feature 1..158: note = Synthetic nucleic acid
  source 1..158: mol_type = other DNA
cagacgacggccagtgtcgacatgaaacgcgcgtctttgcttacactcacgcttatcggcaacacttcttgcggcgatggttcctggctcttcgatcgtgaaccagagcaagggaatatgttacgcgtgacgcagacaggatcctacggtcattcagc

SEQ ID NO: 1425 - DNA, 158 bp, synthetic construct
  misc_feature 1..158: note = Synthetic nucleic acid
  source 1..158: mol_type = other DNA
cagacgacggccagtgtcgacatgaatgctgtaactgaaggaagaaaagtcctccttgaaatcgccaacacttcttgcggcgatggttcctggctcttcgatcactccgtttcttgcctgaaagtcgatccgcttcgaggatcctacggtcattcagc

SEQ ID NO: 1426 - DNA, 158 bp, synthetic construct
  misc_feature 1..158: note = Synthetic nucleic acid
  source 1..158: mol_type = other DNA
cagacgacggccagtgtcgacatgactaagcccatcgtttttagtggcgcacagccctcaggtaacacttcttgcggcgatggttcctggctcttcgatccggtgtacgaagcgattggttttgtggcgaagccggtgggatcctacggtcattcagc

SEQ ID NO: 1427 - DNA, 158 bp, synthetic construct
  misc_feature 1..158: note = Synthetic nucleic acid
  source 1..158: mol_type = other DNA
cagacgacggccagtgtcgacatgagatggtatccatggttacgacctgatttcgaaaaactggtagccaaacacttcttgcggcgatggttcctggctcttcgatcgggcgttgtgctaccggttcctcatcttagaggatcctacggtcattcagc

SEQ ID NO: 1428 - DNA, 158 bp, synthetic construct
  misc_feature 1..158: note = Synthetic nucleic acid
  source 1..158: mol_type = other DNA
cagacgacggccagtgtcgacatgagtacgcaagaggccaccctgcaacaaccgctaacacttcttgcggcgatggttcctggctcttcgatcgtagcttgttttgctgttgatcaggatgaaaatccgcagcgtgatggatcctacggtcattcagc

SEQ ID NO: 1429 - DNA, 158 bp, synthetic construct
  misc_feature 1..158: note = Synthetic nucleic acid
  source 1..158: mol_type = other DNA
cagacgacggccagtgtcgacatgcgtaagtcagttatcgcgattatcatcatcgtgctggtagtgctttaaacacttcttgcggcgatggttcctggctcttcgatcatgaagacgccgacttccgcaacgcgttccggatcctacggtcattcagc

SEQ ID NO: 1430 - DNA, 158 bp, synthetic construct
  misc_feature 1..158: note = Synthetic nucleic acid
  source 1..158: mol_type = other DNA
cagacgacggccagtgtcgacatgggcgatagtattctttctcaagctgaaattgatgcgctaacacttcttgcggcgatggttcctggctcttcgatcccgattttaaattctctgaacgaggaacagcccaaaaaaggatcctacggtcattcagc

SEQ ID NO: 1431 - DNA, 158 bp, synthetic construct
  misc_feature 1..158: note = Synthetic nucleic acid
  source 1..158: mol_type = other DNA
cagacgacggccagtgtcgacatgtccgatttatacaaaaaacactttctgaaactgctcgactttacccctaacacttcttgcggcgatggttcctggctcttcgatccggtgatgatggcaacgcttggggagccaggatcctacggtcattcagc

SEQ ID NO: 1432 - DNA, 158 bp, synthetic construct
  misc_feature 1..158: note = Synthetic nucleic acid
  source 1..158: mol_type = other DNA
cagacgacggccagtgtcgacatgtccgggttttatcataagcatttcctgaaattactcgatttcacgcaacacttcttgcggcgatggttcctggctcttcgatcagcggtgatggtcgcgacgctcagtaaattaggatcctacggtcattcagc

SEQ ID NO: 1433 - DNA, 158 bp, synthetic construct
  misc_feature 1..158: note = Synthetic nucleic acid
  source 1..158: mol_type = other DNA
cagacgacggccagtgtcgacatgtctggttctgttgccgtgacacgcgccattgccgtaacacttcttgcggcgatggttcctggctcttcgatcctgatcttcctcgtgcgacgtaaaacgcgaggtggtgcaaagggatcctacggtcattcagc

SEQ ID NO: 1434 - DNA, 158 bp, synthetic construct
  misc_feature 1..158: note = Synthetic nucleic acid
  source 1..158: mol_type = other DNA
cagacgacggccagtgtcgacatgttgaatacgctgattgtgggtgccagcggctaaacacttcttgcggcgatggttcctggctcttcgatcgccaatattcgtttcggctatgcggaaacgcagtctcttatttccggatcctacggtcattcagc

SEQ ID NO: 1435 - DNA, 158 bp, synthetic construct
  misc_feature 1..158: note = Synthetic nucleic acid
  source 1..158: mol_type = other DNA
cagacgacggccagtgtcgacgtgaaactggatgaaatcgctcggctggcgggagtgtcgcgaacacttcttgcggcgatggttcctggctcttcgatccgtaatctctatcgccgcggcgtgctcagccgtagccccggatcctacggtcattcagc

SEQ ID NO: 1436 - DNA, 158 bp, synthetic construct
  misc_feature 1..158: note = Synthetic nucleic acid
  source 1..158: mol_type = other DNA
cagacgacggccagtgtcgacatgattgataccaccctgccattaactgatatccatcgccaccttgatgaacacttcttgcggcgatggttcctggctcttcgatccgcactgcgagaaaaagtcgccgcgaagtcaggatcctacggtcattcagc

SEQ ID NO: 1437 - DNA, 158 bp, synthetic construct
  misc_feature 1..158: note = Synthetic nucleic acid
  source 1..158: mol_type = other DNA
cagacgacggccagtgtcgacatgattgatttacgcagtgataccgttacccgaccaagccgcgccatgctaacacttcttgcggcgatggttcctggctcttcgatcgcccactggcgtgcattcctggcgcgttacggatcctacggtcattcagc

SEQ ID NO: 1438 - DNA, 158 bp, synthetic construct
  misc_feature 1..158: note = Synthetic nucleic acid
  source 1..158: mol_type = other DNA
cagacgacggccagtgtcgacatgaaaacgttaggtgaatttattgtcgaaaagcagcacgagttttctcataacacttcttgcggcgatggttcctggctcttcgatcgctttatccgtgagttcccggacgcgaagggatcctacggtcattcagc

SEQ ID NO: 1439 - DNA, 158 bp, synthetic construct
  misc_feature 1..158: note = Synthetic nucleic acid
  source 1..158: mol_type = other DNA
cagacgacggccagtgtcgacatgaaactttttcgtatcctcgatcctttcaccttaaccctgatcacggtaacacttcttgcggcgatggttcctggctcttcgatccagcaggaaagcagcgccgataaagctgtaggatcctacggtcattcagc

SEQ ID NO: 1440 - DNA, 158 bp, synthetic construct
  misc_feature 1..158: note = Synthetic nucleic acid
  source 1..158: mol_type = other DNA
cagacgacggccagtgtcgacatgaaagtgacatttgagcagttaaaagcagcctttaatcgggtcttaatttaacacttcttgcggcgatggttcctggctcttcgatccgtgtgggccaaaatccaggcgttaagtggatcctacggtcattcagc

SEQ ID NO: 1441 - DNA, 158 bp, synthetic construct
  misc_feature 1..158: note = Synthetic nucleic acid
  source 1..158: mol_type = other DNA
cagacgacggccagtgtcgacatgaataagaaggtgttaaccctgtctgctgtgatggccaaacacttcttgcggcgatggttcctggctcttcgatccgtagataaagacaacctggctgaattcagcaagaaatccggatcctacggtcattcagc

SEQ ID NO: 1442 - DNA, 158 bp, synthetic construct
  misc_feature 1..158: note = Synthetic nucleic acid
  source 1..158: mol_type = other DNA
cagacgacggccagtgtcgacatgaccgcgataaaacacccggtgctgctgtgggggcttaacacttcttgcggcgatggttcctggctcttcgatcgcagcccttgctttgtctggcttgtgaggaggcgaggattcggatcctacggtcattcagc

SEQ ID NO: 1443 - DNA, 158 bp, synthetic construct
  misc_feature 1..158: note = Synthetic nucleic acid
  source 1..158: mol_type = other DNA
cagacgacggccagtgtcgacatgcgcaatcacagaatttctttacaggatatcgctacgctggaacacttcttgcggcgatggttcctggctcttcgatccctcgggtatcagatttatcacggcaacacgctttggggatcctacggtcattcagc

SEQ ID NO: 1444 - DNA, 158 bp, synthetic construct
  misc_feature 1..158: note = Synthetic nucleic acid
  source 1..158: mol_type = other DNA
cagacgacggccagtgtcgacatgtcccctactatttatgatattgccagggttgcaggcgtataacacttcttgcggcgatggttcctggctcttcgatcgaatattaccgttgccacgcatatgacgctgaaagctggatcctacggtcattcagc

SEQ ID NO: 1445 - DNA, 158 bp, synthetic construct
  misc_feature 1..158: note = Synthetic nucleic acid
  source 1..158: mol_type = other DNA
cagacgacggccagtgtcgacatgtctgcttcgtcattaccattgccgcagggcaagaaacacttcttgcggcgatggttcctggctcttcgatcgaatatcttgctgacccagcgaagcagtaaagcgaaacgctcaggatcctacggtcattcagc

SEQ ID NO: 1446 - DNA, 158 bp, synthetic construct
  misc_feature 1..158: note = Synthetic nucleic acid
  source 1..158: mol_type = other DNA
cagacgacggccagtgtcgacgtgatgaaaaaacctgtcgtgatcggattggcggtagtggtaaacacttcttgcggcgatggttcctggctcttcgatctgacggtacaattcggtgacgaggcaggacatgaagcgggatcctacggtcattcagc

SEQ ID NO: 1447 - DNA, 158 bp, synthetic construct
  misc_feature 1..158: note = Synthetic nucleic acid
  source 1..158: mol_type = other DNA
cagacgacggccagtgtcgacatgaaaaagaaaagacccgtacttcaggatgtggctgaccaacacttcttgcggcgatggttcctggctcttcgatcagatttaggtttcaccttgtcaccgggcggatctattcacggatcctacggtcattcagc

SEQ ID NO: 1448 - DNA, 158 bp, synthetic construct
  misc_feature 1..158: note = Synthetic nucleic acid
  source 1..158: mol_type = other DNA
cagacgacggccagtgtcgacatgaagcaaacagtttatatcgccagccctgagagccagcaaattaacacttcttgcggcgatggttcctggctcttcgatcagggaccaatgtgggtggtggttaacgcacacaaaggatcctacggtcattcagc

SEQ ID NO: 1449 - DNA, 158 bp, synthetic construct
  misc_feature 1..158: note = Synthetic nucleic acid
  source 1..158: mol_type = other DNA
cagacgacggccagtgtcgacatgactatcaaagtaggtatcaacggttttggccgtatcggtaacacttcttgcggcgatggttcctggctcttcgatcacaaagttctggacctgatcgctcacatctccaaaaaaggatcctacggtcattcagc

SEQ ID NO: 1450 - DNA, 158 bp, synthetic construct
  misc_feature 1..158: note = Synthetic nucleic acid
  source 1..158: mol_type = other DNA
cagacgacggccagtgtcgacatgagtaacctgacaggcaccgataaaagcgtcatcctgctaacacttcttgcggcgatggttcctggctcttcgatcgagatggtaattggcagcggcgaggatacctatgtcctcggatcctacggtcattcagc

SEQ ID NO: 1451 - DNA, 158 bp, synthetic construct
  misc_feature 1..158: note = Synthetic nucleic acid
  source 1..158: mol_type = other DNA
cagacgacggccagtgtcgacatgatacaacctatttccggccctcctcctgggcaaccaaacacttcttgcggcgatggttcctggctcttcgatctagtcgcgattatcctgatgctggtctggctggttcgttacggatcctacggtcattcagc

SEQ ID NO: 1452 - DNA, 158 bp, synthetic construct
  misc_feature 1..158: note = Synthetic nucleic acid
  source 1..158: mol_type = other DNA
cagacgacggccagtgtcgacatgattaatgaagccacgctggcagaaagtattcgccaacacttcttgcggcgatggttcctggctcttcgatcgcggcagctcagtgaatttatccagacgcaatattttgataccggatcctacggtcattcagc

SEQ ID NO: 1453 - DNA, 158 bp, synthetic construct
  misc_feature 1..158: note = Synthetic nucleic acid
  source 1..158: mol_type = other DNA
cagacgacggccagtgtcgacatgcagcccaaaatttactggattgataacctgcgagggataaacacttcttgcggcgatggttcctggctcttcgatctggtacaacgaatcgacagaaacagattagtgagtcttggatcctacggtcattcagc

SEQ ID NO: 1454 - DNA, 158 bp, synthetic construct
  misc_feature 1..158: note = Synthetic nucleic acid
  source 1..158: mol_type = other DNA
cagacgacggccagtgtcgacatggagctgctctgccctgccggaaatctcccggaacacttcttgcggcgatggttcctggctcttcgatcaggcacgcaaaccactcttggcgcatatcaccgtaaatggcagcaaggatcctacggtcattcagc

SEQ ID NO: 1455 - DNA, 158 bp, synthetic construct
  misc_feature 1..158: note = Synthetic nucleic acid
  source 1..158: mol_type = other DNA
cagacgacggccagtgtcgacgtgataaaacgtaatttgccactgatgatcaccatcggcgtctttgtaacacttcttgcggcgatggttcctggctcttcgatcccagtgacaagagtcaacattgcgcagcaacctggatcctacggtcattcagc

SEQ ID NO: 1456 - DNA, 158 bp, synthetic construct
  misc_feature 1..158: note = Synthetic nucleic acid
  source 1..158: mol_type = other DNA
cagacgacggccagtgtcgacatgaaaaccgcttacattgccaaacaacgtcaaattagcttcgtgaaataacacttcttgcggcgatggttcctggctcttcgatctgttcgcgagagcgtcccttctctgctggctggatcctacggtcattcagc

SEQ ID NO: 1457 - DNA, 158 bp, synthetic construct
  misc_feature 1..158: note = Synthetic nucleic acid
  source 1..158: mol_type = other DNA
cagacgacggccagtgtcgacatgaaaataaagaacattctactcaccctttgcacctcactcctgcttaaacacttcttgcggcgatggttcctggctcttcgatcagacggattccacaaagagagcgagctgtggggatcctacggtcattcagc

SEQ ID NO: 1458 - DNA, 158 bp, synthetic construct
  misc_feature 1..158: note = Synthetic nucleic acid
  source 1..158: mol_type = other DNA
cagacgacggccagtgtcgacatgatttacgtctctcgccgattactcatcacctgtttgctaacacttcttgcggcgatggttcctggctcttcgatccttatcgtcttgttaattcaggagtctcgcaaaaaaatgggatcctacggtcattcagc

SEQ ID NO: 1459 - DNA, 158 bp, synthetic construct
  misc_feature 1..158: note = Synthetic nucleic acid
  source 1..158: mol_type = other DNA
cagacgacggccagtgtcgacatgcagagcgataaagtgctcaatttgccggcaggctactttaacacttcttgcggcgatggttcctggctcttcgatcagcgcgccgttttaatgaaagcagaggacaaagaacgaggatcctacggtcattcagc

SEQ ID NO: 1460 - DNA, 158 bp, synthetic construct
  misc_feature 1..158: note = Synthetic nucleic acid
  source 1..158: mol_type = other DNA
cagacgacggccagtgtcgacatgccattactcgatattcgtaacctgaccattgaatttaaaaccggtaacacttcttgcggcgatggttcctggctcttcgatcgtcatttcccgctgaacatggagaaagagctgggatcctacggtcattcagc

SEQ ID NO: 1461 - DNA, 158 bp, synthetic construct
  misc_feature 1..158: note = Synthetic nucleic acid
  source 1..158: mol_type = other DNA
cagacgacggccagtgtcgacatgcgacatagcgtactttttgcgacagcgtttgccacgcttatctaacacttcttgcggcgatggttcctggctcttcgatcctgggtgaatgaggcgctggcagcgcagaagtcaggatcctacggtcattcagc

SEQ ID NO: 1462 - DNA, 158 bp, synthetic construct
  misc_feature 1..158: note = Synthetic nucleic acid
  source 1..158: mol_type = other DNA
cagacgacggccagtgtcgacatgcgtattcgctacggttgggaactggctcttgccgcactgctaacacttcttgcggcgatggttcctggctcttcgatctggctggcgcgtcgggccaataacccattgccagtaggatcctacggtcattcagc

SEQ ID NO: 1463 - DNA, 158 bp, synthetic construct
  misc_feature 1..158: note = Synthetic nucleic acid
  source 1..158: mol_type = other DNA
cagacgacggccagtgtcgacatggtgaaatcgacgccatgtataaccattgatttcatgaatatgtcgcaaacacttcttgcggcgatggttcctggctcttcgatcccacaaatggccacgatgtttcgcggtggtggatcctacggtcattcagc

SEQ ID NO: 1464 - DNA, 158 bp, synthetic construct
  misc_feature 1..158: note = Synthetic nucleic acid
  source 1..158: mol_type = other DNA
cagacgacggccagtgtcgacttggctacaatgaaagatgttgcccgcctggcgggaacacttcttgcggcgatggttcctggctcttcgatccgattacaacttactccgattctgatggaacgcggttcggcttgcggatcctacggtcattcagc

SEQ ID NO: 1465 - DNA, 158 bp, synthetic construct
  misc_feature 1..158: note = Synthetic nucleic acid
  source 1..158: mol_type = other DNA
cagacgacggccagtgtcgacatgaaactcgccgtttatagcacaaaacagtacgacaagaagtacctaacacttcttgcggcgatggttcctggctcttcgatcaaaggcgaaacctgcccgaacgaactggttccaggatcctacggtcattcagc

SEQ ID NO: 1466 - DNA, 158 bp, synthetic construct
  misc_feature 1..158: note = Synthetic nucleic acid
  source 1..158: mol_type = other DNA
cagacgacggccagtgtcgacatgaacaagtggggcgtagggttaacatttttgctggcggcaaaacacttcttgcggcgatggttcctggctcttcgatctaacggcggtacgttcgatcagatcagcaaacgctctggatcctacggtcattcagc

SEQ ID NO: 1467 - DNA, 158 bp, synthetic construct
  misc_feature 1..158: note = Synthetic nucleic acid
  source 1..158: mol_type = other DNA
cagacgacggccagtgtcgacatgagccagcttccagggttgtcacgggaaacaagagagaaacacttcttgcggcgatggttcctggctcttcgatcatttggcccgtatgaagagggcgggaacgaagaagagggcggatcctacggtcattcagc

SEQ ID NO: 1468 - DNA, 158 bp, synthetic construct
  misc_feature 1..158: note = Synthetic nucleic acid
  source 1..158: mol_type = other DNA
cagacgacggccagtgtcgacatgcacaaatttactaaagccctggcagccattggtaacacttcttgcggcgatggttcctggctcttcgatcactttaaagaagaactggagaaaaaaggtttaggcggtaaggccggatcctacggtcattcagc

SEQ ID NO: 1469 - DNA, 158 bp, synthetic construct
  misc_feature 1..158: note = Synthetic nucleic acid
  source 1..158: mol_type = other DNA
cagacgacggccagtgtcgacatgcagggttctgtgacagagtttctaaaaccgcgcctggttgatataacacttcttgcggcgatggttcctggctcttcgatcaactggccaccggcaagcatcgctgacgagttgggatcctacggtcattcagc

SEQ ID NO: 1470 - DNA, 158 bp, synthetic construct
  misc_feature 1..158: note = Synthetic nucleic acid
  source 1..158: mol_type = other DNA
cagacgacggccagtgtcgacatgcatattacatacgatctgccggttgctattgatgacattattgaagcaacacttcttgcggcgatggttcctggctcttcgatctctcaaatcaccggtttcgttgacgctatcggatcctacggtcattcagc

SEQ ID NO: 1471 - DNA, 158 bp, synthetic construct
  misc_feature 1..158: note = Synthetic nucleic acid
  source 1..158: mol_type = other DNA
cagacgacggccagtgtcgacatggcttcacaactgactgatgcatttgcgcgtaagttttaaacacttcttgcggcgatggttcctggctcttcgatcaccggtattacgcaaaacttatcgtacattggcggcacgggatcctacggtcattcagc

SEQ ID NO: 1472 - DNA, 158 bp, synthetic construct
  misc_feature 1..158: note = Synthetic nucleic acid
  source 1..158: mol_type = other DNA
cagacgacggccagtgtcgacatggttaaaacccaacgtgttgtgatcactcccggcaacacttcttgcggcgatggttcctggctcttcgatccggcgcttaatctcgccatcaaaatgattgttaacacccaagcaggatcctacggtcattcagc

SEQ ID NO: 1473 - DNA, 158 bp, synthetic construct
  misc_feature 1..158: note = Synthetic nucleic acid
  source 1..158: mol_type = other DNA
cagacgacggccagtgtcgacatgaaattacgctctgtaacctacgcattattcattgctggcctgaacacttcttgcggcgatggttcctggctcttcgatcctgatctgctgaaagccgtggatgaggtgcaagggggatcctacggtcattcagc

SEQ ID NO: 1474 - DNA, 158 bp, synthetic construct
  misc_feature 1..158: note = Synthetic nucleic acid
  source 1..158: mol_type = other DNA
cagacgacggccagtgtcgacatgaataacagcgcttttactttccagacactacacccggataaacacttcttgcggcgatggttcctggctcttcgatcacaagaaccccctttgcaattaacacctatgtatcagggatcctacggtcattcagc

SEQ ID NO: 1475 - DNA, 158 bp, synthetic construct
  misc_feature 1..158: note = Synthetic nucleic acid
  source 1..158: mol_type = other DNA
cagacgacggccagtgtcgacatgacccaacccgttctggacattcaacaactgcatttgaaacacttcttgcggcgatggttcctggctcttcgatctgcctgttggtatccgcagcaggaggttataagtgtcctaggatcctacggtcattcagc

SEQ ID NO: 1476 - DNA, 158 bp, synthetic construct
  misc_feature 1..158: note = Synthetic nucleic acid
  source 1..158: mol_type = other DNA
cagacgacggccagtgtcgacatgatacgtttcgctgtgattggtacgaactggatcactcaacacttcttgcggcgatggttcctggctcttcgatcgactggggtgatttttccggcagatagcgtaaaactattcggatcctacggtcattcagc

SEQ ID NO: 1477 - DNA, 158 bp, synthetic construct
  misc_feature 1..158: note = Synthetic nucleic acid
  source 1..158: mol_type = other DNA
cagacgacggccagtgtcgacatgatcgaaaaaatctggtctggtgaatcccctttgtggcggaacacttcttgcggcgatggttcctggctcttcgatctgcttacgcaactaaccttgctggcttctggcaacagtggatcctacggtcattcagc

SEQ ID NO: 1478 - DNA, 158 bp, synthetic construct
  misc_feature 1..158: note = Synthetic nucleic acid
  source 1..158: mol_type = other DNA
cagacgacggccagtgtcgacatgatgcaggatttgcgtctgatattaatcattgttggcgcgatcgaacacttcttgcggcgatggttcctggctcttcgatccatcatccgcgaagtcaaagacgccaacgccacaggatcctacggtcattcagc

SEQ ID NO: 1479 - DNA, 158 bp, synthetic construct
  misc_feature 1..158: note = Synthetic nucleic acid
  source 1..158: mol_type = other DNA
cagacgacggccagtgtcgacatgccactgcataatttaacccgttttccacggctggagtttatcggaacacttcttgcggcgatggttcctggctcttcgatccctgcgctgttcgcctatcatccccacgttggcggatcctacggtcattcagc

SEQ ID NO: 1480 - DNA, 158 bp, synthetic construct
  misc_feature 1..158: note = Synthetic nucleic acid
  source 1..158: mol_type = other DNA
cagacgacggccagtgtcgacatgggtcaactgattgacggcgtctggcatgacacctgaacacttcttgcggcgatggttcctggctcttcgatcgatctcgatgaaccgcatggacgagatgttcgcttcggttatggatcctacggtcattcagc

SEQ ID NO: 1481 - DNA, 158 bp, synthetic construct
  misc_feature 1..158: note = Synthetic nucleic acid
  source 1..158: mol_type = other DNA
cagacgacggccagtgtcgacatgtcgcacgtagagttacaaccgggttttgactttcaaacacttcttgcggcgatggttcctggctcttcgatcgtgttacatatgcatgatttactgcgtgcaggcgtagtgaagggatcctacggtcattcagc

SEQ ID NO: 1482 - DNA, 158 bp, synthetic construct
  misc_feature 1..158: note = Synthetic nucleic acid
  source 1..158: mol_type = other DNA
cagacgacggccagtgtcgacatgtcttctgtttctacatcggggtctggcgcacctaaaacacttcttgcggcgatggttcctggctcttcgatcatcttcgaccgttacaagcaaaaagcgaaacgcactgtcacaggatcctacggtcattcagc

SEQ ID NO: 1483 - DNA, 158 bp, synthetic construct
  misc_feature 1..158: note = Synthetic nucleic acid
  source 1..158: mol_type = other DNA
cagacgacggccagtgtcgacgtgaacagacgtaattttattaaagcagcctcctgcggggcattaacacttcttgcggcgatggttcctggctcttcgatcgaccatcacgacggaggagacgatcatgagtcacagggatcctacggtcattcagc

SEQ ID NO: 1484 - DNA, 158 bp, synthetic construct
  misc_feature 1..158: note = Synthetic nucleic acid
  source 1..158: mol_type = other DNA
cagacgacggccagtgtcgacgtgaccaggaccaacctcatcaccggttttctcggcagcgaacacttcttgcggcgatggttcctggctcttcgatcgagcgcgctgttgaagcttcgtttagcgactaccgcgttcggatcctacggtcattcagc

SEQ ID NO: 1485 - DNA, 158 bp, synthetic construct
  misc_feature 1..158: note = Synthetic nucleic acid
  source 1..158: mol_type = other DNA
cagacgacggccagtgtcgacgtggatagagatcaaacaaacagcagcctgttcaatgatgatccaacacttcttgcggcgatggttcctggctcttcgatcgcagagtttttgctggcgtgtgaattaccacacggatcctacggtcattcagccgc

SEQ ID NO: 1486 - DNA, 158 bp, synthetic construct
  misc_feature 1..158: note = Synthetic nucleic acid
  source 1..158: mol_type = other DNA
cagacgacggccagtgtcgacatgaataatgaacaacgcggcgtcgcgctgctcattgtactaacacttcttgcggcgatggttcctggctcttcgatcagcgcccaaatctatcggcgtacgctgcaactctacagtggatcctacggtcattcagc

SEQ ID NO: 1487 - DNA, 158 bp, synthetic construct
  misc_feature 1..158: note = Synthetic nucleic acid
  source 1..158: mol_type = other DNA
cagacgacggccagtgtcgacatgcagataaaacgctcgattgagaaaatcccgggggaacacttcttgcggcgatggttcctggctcttcgatcagccagagcagcgaaaatcgaaattttaggtacggtgaaatgtggatcctacggtcattcagc

SEQ ID NO: 1488 - DNA, 158 bp, synthetic construct
  misc_feature 1..158: note = Synthetic nucleic acid
  source 1..158: mol_type = other DNA
cagacgacggccagtgtcgacatgcctacaaaaatgagaacaacccgtaatctattattaatggctacgctattaggtaaacacttcttgcggcgatggttcctggctcttcgatcgcacgttgatggtctgcccaccggatcctacggtcattcagc

SEQ ID NO: 1489 - DNA, 158 bp, synthetic construct
  misc_feature 1..158: note = Synthetic nucleic acid
  source 1..158: mol_type = other DNA
cagacgacggccagtgtcgacatggcaacacgaattgaatttcacaagcacggtggcccggaagtaaacacttcttgcggcgatggttcctggctcttcgatcgggcgacgcaaggttccagcctgctgattccaggtggatcctacggtcattcagc

SEQ ID NO: 1490 - DNA, 158 bp, synthetic construct
  misc_feature 1..158: note = Synthetic nucleic acid
  source 1..158: mol_type = other DNA
cagacgacggccagtgtcgacatggcaacactaaaagacatcgcaatcgaagctggcgtatccctgaacacttcttgcggcgatggttcctggctcttcgatcccagcaaattaaaactgcgcggcacgacccgtagaggatcctacggtcattcagc

SEQ ID NO: 1491 - DNA, 158 bp, synthetic construct
  misc_feature 1..158: note = Synthetic nucleic acid
  source 1..158: mol_type = other DNA
cagacgacggccagtgtcgacatggcgttattaaatgtagataaattatcggtgcatttcggcgacgaaaaacacttcttgcggcgatggttcctggctcttcgatcacttgatgatgccgggaggccgacactaaatggatcctacggtcattcagc

SEQ ID NO: 1492 - DNA, 158 bp, synthetic construct
  misc_feature 1..158: note = Synthetic nucleic acid
  source 1..158: mol_type = other DNA
cagacgacggccagtgtcgacatgtcacatctcgcagaactggttgccagtgcaacacttcttgcggcgatggttcctggctcttcgatccgttcattcttcgaaaacgatctgcgtttcctcaaacagtttaaacttggatcctacggtcattcagc

SEQ ID NO: 1493 - DNA, 158 bp, synthetic construct
  misc_feature 1..158: note = Synthetic nucleic acid
  source 1..158: mol_type = other DNA
cagacgacggccagtgtcgacgtggaagcgattaagggatcggacgttaatgtcccgaacacttcttgcggcgatggttcctggctcttcgatcttggtggtgttgctttatggttgcatcgtagtaaatggttgggcggatcctacggtcattcagc

SEQ ID NO: 1494 - DNA, 158 bp, synthetic construct
  misc_feature 1..158: note = Synthetic nucleic acid
  source 1..158: mol_type = other DNA
cagacgacggccagtgtcgacgtgttaaaaaaatgtctgcccctgctgttgctgtgcacagcgcccaacacttcttgcggcgatggttcctggctcttcgatcggattagcgaatggcaacgcgccgtcagccgtacgggatcctacggtcattcagc

SEQ ID NO: 1495 - DNA, 158 bp, synthetic construct
  misc_feature 1..158: note = Synthetic nucleic acid
  source 1..158: mol_type = other DNA
cagacgacggccagtgtcgacttggcgatggcatgtttgtgtctggcaaacatatcctggaacacttcttgcggcgatggttcctggctcttcgatccgtttagcgcgctggggtatttacgcgtcgattatcaaattggatcctacggtcattcagc

SEQ ID NO: 1496 - DNA, 158 bp, synthetic construct
  misc_feature 1..158: note = Synthetic nucleic acid
  source 1..158: mol_type = other DNA
cagacgacggccagtgtcgacatgaaaaagatacctttaggcacaacggatattacgctttcgcgaatgggaacacttcttgcggcgatggttcctggctcttcgatcagggaaatggcagaggccctggagcgtgctggatcctacggtcattcagc

SEQ ID NO: 1497 - DNA, 158 bp, synthetic construct
  misc_feature 1..158: note = Synthetic nucleic acid
  source 1..158: mol_type = other DNA
cagacgacggccagtgtcgacatgaacgcaataatatcgcccgattattactatgttcttaccgttgctaacacttcttgcggcgatggttcctggctcttcgatcaagcaattttgcagttttggcgcgaaaggtacggatcctacggtcattcagc

SEQ ID NO: 1498 - DNA, 158 bp, synthetic construct
  misc_feature 1..158: note = Synthetic nucleic acid
  source 1..158: mol_type = other DNA
cagacgacggccagtgtcgacatgaatatggaagaaattgtggcccttagtgtaaagcataacgtctcggatctaaacacttcttgcggcgatggttcctggctcttcgatcaccgggtgggggaagggcgtttgactggatcctacggtcattcagc

SEQ ID NO: 1499 - DNA, 158 bp, synthetic construct
  misc_feature 1..158: note = Synthetic nucleic acid
  source 1..158: mol_type = other DNA
cagacgacggccagtgtcgacatgagagtagaaaataataatgtttctgggcaaaaccatgacccggaaaacacttcttgcggcgatggttcctggctcttcgatcgtaatgctctacgcaattacaacgcgaagacgggatcctacggtcattcagc

SEQ ID NO: 1500 - DNA, 158 bp, synthetic construct
  misc_feature 1..158: note = Synthetic nucleic acid
  source 1..158: mol_type = other DNA
cagacgacggccagtgtcgacatgcgcaaatatcgtctaagtgaagaacagcgagcctttagttatcaggaaaacacttcttgcggcgatggttcctggctcttcgatccgcgaacgccgctggcagggttattgacaggatcctacggtcattcagc

SEQ ID NO: 1501 - DNA, 158 bp, synthetic construct
  misc_feature 1..158: note = Synthetic nucleic acid
  source 1..158: mol_type = other DNA
cagacgacggccagtgtcgacatgctgacacttgcccgccaacaacagcgacaaaatattaacacttcttgcggcgatggttcctggctcttcgatccgccggtgtttatctggttattgttaaaagcaggacgttctggatcctacggtcattcagc

SEQ ID NO: 1502 - DNA, 158 bp, synthetic construct
  misc_feature 1..158: note = Synthetic nucleic acid
  source 1..158: mol_type = other DNA
cagacgacggccagtgtcgacatggcacaacgagtacagctcactgcaacggtgtcaacacttcttgcggcgatggttcctggctcttcgatccgcgccgatttcgaagaacataaggatgaagtggactggttagcgggatcctacggtcattcagc

SEQ ID NO: 1503 - DNA, 158 bp, synthetic construct
  misc_feature 1..158: note = Synthetic nucleic acid
  source 1..158: mol_type = other DNA
cagacgacggccagtgtcgacatggcttttacaccttttcctccccgtcagcctacggcttaacacttcttgcggcgatggttcctggctcttcgatcattgcatatcgagccgctgccgtattcgctcgaagagcacggatcctacggtcattcagc

SEQ ID NO: 1504 - DNA, 158 bp, synthetic construct
  misc_feature 1..158: note = Synthetic nucleic acid
  source 1..158: mol_type = other DNA
cagacgacggccagtgtcgacatgggctttaccacaagagtaaaaagcgaagcgagcgagaagaaaaacacttcttgcggcgatggttcctggctcttcgatccggctgtcgcccttgaccgtcttatcagtaaggagggatcctacggtcattcagc

SEQ ID NO: 1505 - DNA, 158 bp, synthetic construct
  misc_feature 1..158: note = Synthetic nucleic acid
  source 1..158: mol_type = other DNA
cagacgacggccagtgtcgacatgaatgcactgaccgccgtacaaaataacgctgtcgattaacacttcttgcggcgatggttcctggctcttcgatctttcgcttacgcctctaaccactaccagacgcatcagtctggatcctacggtcattcagc

SEQ ID NO: 1506 - DNA, 158 bp, synthetic construct
  misc_feature 1..158: note = Synthetic nucleic acid
  source 1..158: mol_type = other DNA
cagacgacggccagtgtcgacatgagcgaaacggcatcctggcagccgagcgcatcaacacttcttgcggcgatggttcctggctcttcgatcgagacactggctgaagtcatcgcctttagcgttgaccgggcattgggatcctacggtcattcagc

SEQ ID NO: 1507 - DNA, 158 bp, synthetic construct
  misc_feature 1..158: note = Synthetic nucleic acid
  source 1..158: mol_type = other DNA
cagacgacggccagtgtcgacatgagttggatatcaccggaactgattgagatcctgctgaccatcctcaaaaacacttcttgcggcgatggttcctggctcttcgatccggctgtcattctctggcaggcgcaacagggatcctacggtcattcagc

SEQ ID NO: 1508 - DNA, 158 bp, synthetic construct
  misc_feature 1..158: note = Synthetic nucleic acid
  source 1..158: mol_type = other DNA
cagacgacggccagtgtcgacatgcttttagctacggcactgttaattgttggtttacttttggtcgtttaaacacttcttgcggcgatggttcctggctcttcgatctactggttatcgccaatactcgttgaacccggatcctacggtcattcagc

SEQ ID NO: 1509 - DNA, 158 bp, synthetic construct
  misc_feature 1..158: note = Synthetic nucleic acid
  source 1..158: mol_type = other DNA
cagacgacggccagtgtcgacatggcagaatacaaagataatttacttggtgaggcgaacagctttctaacacttcttgcggcgatggttcctggctcttcgatcttccgcgcgttgttgaaaaagcaccagatttggggatcctacggtcattcagc

SEQ ID NO: 1510 - DNA, 158 bp, synthetic construct
  misc_feature 1..158: note = Synthetic nucleic acid
  source 1..158: mol_type = other DNA
cagacgacggccagtgtcgacatggcatgtggcgagttctccctgattgcccgttattttaacacttcttgcggcgatggttcctggctcttcgatccattagactggaaaggatatgaccattttgccacgccagtcggatcctacggtcattcagc

SEQ ID NO: 1511 - DNA, 158 bp, synthetic construct
  misc_feature 1..158: note = Synthetic nucleic acid
  source 1..158: mol_type = other DNA
cagacgacggccagtgtcgacatgaagccgtccgttatcctctacaaagccttacctgatgatttactaacacttcttgcggcgatggttcctggctcttcgatcaagaactgtgtgaatccgcacgtcgcggacataggatcctacggtcattcagc

SEQ ID NO: 1512 - DNA, 158 bp, synthetic construct
  misc_feature 1..158: note = Synthetic nucleic acid
  source 1..158: mol_type = other DNA
cagacgacggccagtgtcgacatgacaaaattacaacttaagtaccgggagttaaaaattatctcggtaatcgctgcaacacttcttgcggcgatggttcctggctcttcgatccaagcggcggaaagcgaagataatggatcctacggtcattcagc

SEQ ID NO: 1513 - DNA, 158 bp, synthetic construct
  misc_feature 1..158: note = Synthetic nucleic acid
  source 1..158: mol_type = other DNA
cagacgacggccagtgtcgacatgacagacttaatccaacgccctcgtcgcctgcgaacacttcttgcggcgatggttcctggctcttcgatcagctactttgcgctggatttggctgagaagaagattctgcgtgcgggatcctacggtcattcagc

SEQ ID NO: 1514 - DNA, 158 bp, synthetic construct
  misc_feature 1..158: note = Synthetic nucleic acid
  source 1..158: mol_type = other DNA
cagacgacggccagtgtcgacatgcaatacaaccccttaggaaaaaccgaccttcgcgtttaacacttcttgcggcgatggttcctggctcttcgatcaacgccgtataaaccgcatcctgtcgtaggatttaaatccggatcctacggtcattcagc

SEQ ID NO: 1515 - DNA, 158 bp, synthetic construct
  misc_feature 1..158: note = Synthetic nucleic acid
  source 1..158: mol_type = other DNA
cagacgacggccagtgtcgacatgcaggcgttacttttagaacagcaggacggcaaaactctcgaacacttcttgcggcgatggttcctggctcttcgatcccagatccagggtcgcacgctggtgaaggttaacatgggatcctacggtcattcagc

SEQ ID NO: 1516 - DNA, 158 bp, synthetic construct
  misc_feature 1..158: note = Synthetic nucleic acid
  source 1..158: mol_type = other DNA
cagacgacggccagtgtcgacatggcgaatatgtttgccctgattctggtgattgccacactggtaacacttcttgcggcgatggttcctggctcttcgatcggtctgcgcttaagtcgcattggcggcatccattacggatcctacggtcattcagc

SEQ ID NO: 1517 - DNA, 158 bp, synthetic construct
  misc_feature 1..158: note = Synthetic nucleic acid
  source 1..158: mol_type = other DNA
cagacgacggccagtgtcgacatgaatttagaaaaaatcaatgagttaaccgcgcaagatatggcgggtgttaataacacttcttgcggcgatggttcctggctcttcgatcacatcgctgttcaacgcgatcgttggggatcctacggtcattcagc

SEQ ID NO: 1518 - DNA, 158 bp, synthetic construct
  misc_feature 1..158: note = Synthetic nucleic acid
  source 1..158: mol_type = other DNA
cagacgacggccagtgtcgacatgagtaagatttttgaagataactcgctgactatcggtcacacgcaacacttcttgcggcgatggttcctggctcttcgatccgatctcttcactgagaaagaattgcaacagggaggatcctacggtcattcagc

SEQ ID NO: 1519 - DNA, 158 bp, synthetic construct
  misc_feature 1..158: note = Synthetic nucleic acid
  source 1..158: mol_type = other DNA
cagacgacggccagtgtcgacatgatcgactttggtaacttttattctctgattgccaaaaatcatctttcacactgaacacttcttgcggcgatggttcctggctcttcgatcgtgctgattgcgcgcaagccggcgggatcctacggtcattcagc

SEQ ID NO: 1520 - DNA, 158 bp, synthetic construct
  misc_feature 1..158: note = Synthetic nucleic acid
  source 1..158: mol_type = other DNA
cagacgacggccagtgtcgacgtgaccattgctattgttataggcacacatggttgggctaacacttcttgcggcgatggttcctggctcttcgatcaactgaaaatgatggatctgatcagcaaaatcgataagagtggatcctacggtcattcagc

SEQ ID NO: 1521 - DNA, 158 bp, synthetic construct
  misc_feature 1..158: note = Synthetic nucleic acid
  source 1..158: mol_type = other DNA
cagacgacggccagtgtcgacgtggcacaggaatatactgttgaacaactaaaccacggccgtaaagtctataacacttcttgcggcgatggttcctggctcttcgatcgggcggatcagccgtcaattctgccgcagggatcctacggtcattcagc

SEQ ID NO: 1522 - DNA, 158 bp, synthetic construct
  misc_feature 1..158: note = Synthetic nucleic acid
  source 1..158: mol_type = other DNA
cagacgacggccagtgtcgacatgacgatgccaacgaatcaatgcccgtggcggatgcaggttaacacttcttgcggcgatggttcctggctcttcgatcgctcctgccatccgcagggggatttggttctcgcacgtggatcctacggtcattcagc

SEQ ID NO: 1523 - DNA, 158 bp, synthetic construct
  misc_feature 1..158: note = Synthetic nucleic acid
  source 1..158: mol_type = other DNA
cagacgacggccagtgtcgacatgcctaacattacctggtgcgacctgcctgaagatgtaacacttcttgcggcgatggttcctggctcttcgatcggggtattctgcatcctctcaggcagcctgaatcagaagagcggatcctacggtcattcagc

SEQ ID NO: 1524 - DNA, 158 bp, synthetic construct
  misc_feature 1..158: note = Synthetic nucleic acid
  source 1..158: mol_type = other DNA
cagacgacggccagtgtcgacatggataattttcttgctctgaccttaacgggtaaaaaaccggttatcaaacacttcttgcggcgatggttcctggctcttcgatccgcgggattaatgctcgaaaaaataagcttaggatcctacggtcattcagc

SEQ ID NO: 1525 - DNA, 158 bp, synthetic construct
  misc_feature 1..158: note = Synthetic nucleic acid
  source 1..158: mol_type = other DNA
cagacgacggccagtgtcgacatgtttgaaatccaccctgttaagaaagtctcggtggttattcccaacacttcttgcggcgatggttcctggctcttcgatcaagttatccgtccatccagcaaggaaaatgaaagaggatcctacggtcattcagc

SEQ ID NO: 1526 - DNA, 158 bp, synthetic construct
  misc_feature 1..158: note = Synthetic nucleic acid
  source 1..158: mol_type = other DNA
cagacgacggccagtgtcgacatgaagcagcaggcaggcattggcattcttttggcgctcaccaaacacttcttgcggcgatggttcctggctcttcgatctacaacggtggtatcgcaaccccgcgcaggcgaaattggatcctacggtcattcagc

SEQ ID NO: 1527 - DNA, 158 bp, synthetic construct
  misc_feature 1..158: note = Synthetic nucleic acid
  source 1..158: mol_type = other DNA
cagacgacggccagtgtcgacatgaaggataacaccgtgccactgaaattgattgccctgttaaacacttcttgcggcgatggttcctggctcttcgatctgggcggtgaaatatccctgcgtagtgcagaaaaaataggatcctacggtcattcagc

SEQ ID NO: 1528 - DNA, 158 bp, synthetic construct
  misc_feature 1..158: note = Synthetic nucleic acid
  source 1..158: mol_type = other DNA
cagacgacggccagtgtcgacatgaatactgtcggcacgccgttgctatggggcggattaacacttcttgcggcgatggttcctggctcttcgatcgcctgggtgaattatcggcatgataagcagcggggtggagtaggatcctacggtcattcagc

SEQ ID NO: 1529 - DNA, 158 bp, synthetic construct
  misc_feature 1..158: note = Synthetic nucleic acid
  source 1..158: mol_type = other DNA
cagacgacggccagtgtcgacatgacaaagtatgcattagtcggtgatgtgggcggcaccaaaacacttcttgcggcgatggttcctggctcttcgatcggtgcacatttacgccagaccttaggtcacattctgcaaggatcctacggtcattcagc

SEQ ID NO: 1530 - DNA, 158 bp, synthetic construct
  misc_feature 1..158: note = Synthetic nucleic acid
  source 1..158: mol_type = other DNA
cagacgacggccagtgtcgacatgacaacccagactgtctctggtcgccgttatttcacgaaaaacacttcttgcggcgatggttcctggctcttcgatcttttgctggcggtgctggtagacaacaaaaagcagaccggatcctacggtcattcagc

SEQ ID NO: 1531 - DNA, 158 bp, synthetic construct
  misc_feature 1..158: note = Synthetic nucleic acid
  source 1..158: mol_type = other DNA
cagacgacggccagtgtcgacatgagaaccgttaaggtattcgaggaagcctggcccttacataccaacacttcttgcggcgatggttcctggctcttcgatccgcttcagttcacgacgggcgaattgcatcttgggggatcctacggtcattcagc

SEQ ID NO: 1532 - DNA, 158 bp, synthetic construct
  misc_feature 1..158: note = Synthetic nucleic acid
  source 1..158: mol_type = other DNA
cagacgacggccagtgtcgacatgagcggcgctcgattacacacgctgctgcctgaattaaaacacttcttgcggcgatggttcctggctcttcgatcaacgcgcgaggaactactcctcgcacacaaaaacgtaattggatcctacggtcattcagc

SEQ ID NO: 1533 - DNA, 158 bp, synthetic construct
  misc_feature 1..158: note = Synthetic nucleic acid
  source 1..158: mol_type = other DNA
cagacgacggccagtgtcgacatgagtaaacaacgagtttttattgctggtcatcgcgggatggtaacacttcttgcggcgatggttcctggctcttcgatctggttccttgagaatcaagaccgctttcggggggtcggatcctacggtcattcagc

SEQ ID NO: 1534 - DNA, 158 bp, synthetic construct
  misc_feature 1..158: note = Synthetic nucleic acid
  source 1..158: mol_type = other DNA
cagacgacggccagtgtcgacatgagtaaacccattgtgatggaacgcggtgttaaataccgcgataacacttcttgcggcgatggttcctggctcttcgatcccgatttgcaggcgaaagggatggaagttaagtttggatcctacggtcattcagc

SEQ ID NO: 1535 - DNA, 158 bp, synthetic construct
  misc_feature 1..158: note = Synthetic nucleic acid
  source 1..158: mol_type = other DNA
cagacgacggccagtgtcgacatgagtgaagcactactgaacgcgggacgtcagacgttaataacacttcttgcggcgatggttcctggctcttcgatcataaacctgcaggatttctatcaggccgggattatttctggatcctacggtcattcagc

SEQ ID NO: 1536 - DNA, 158 bp, synthetic construct
  misc_feature 1..158: note = Synthetic nucleic acid
  source 1..158: mol_type = other DNA
cagacgacggccagtgtcgacatgatgtccctggcgtggccattatttcgcgttacggaaaacacttcttgcggcgatggttcctggctcttcgatcgcgcggaccaaacgtgtaatataatagactccctgcatgcgggatcctacggtcattcagc

SEQ ID NO: 1537 - DNA, 158 bp, synthetic construct
  misc_feature 1..158: note = Synthetic nucleic acid
  source 1..158: mol_type = other DNA
cagacgacggccagtgtcgacatgattagcggcgtgctgtacgccctgttagcaaacacttcttgcggcgatggttcctggctcttcgatcgagcaaaaccagaaaaacctttaactgaatctgtctcagaaagtaatggatcctacggtcattcagc

SEQ ID NO: 1538 - DNA, 158 bp, synthetic construct
  misc_feature 1..158: note = Synthetic nucleic acid
  source 1..158: mol_type = other DNA
cagacgacggccagtgtcgacatgcgcatcggacaatatcagctcagaaatcgcctgatcgaacacttcttgcggcgatggttcctggctcttcgatcgctggaggcgttggaggcatacttcgaaaattttgcgtttggatcctacggtcattcagc

SEQ ID NO: 1539 - DNA, 158 bp, synthetic construct
  misc_feature 1..158: note = Synthetic nucleic acid
  source 1..158: mol_type = other DNA
cagacgacggccagtgtcgacatgggcaaagcagtcattgcaattcatggtggcgcaggtaacacttcttgcggcgatggttcctggctcttcgatcgtatctaccgtgaaaaaggggacaccgttgccacacaggttggatcctacggtcattcagc

SEQ ID NO: 1540 - DNA, 158 bp, synthetic construct
  misc_feature 1..158: note = Synthetic nucleic acid
  source 1..158: mol_type = other DNA
cagacgacggccagtgtcgacatgggcacgaccaaacacagtaaactgcttatcctgggttcaaacacttcttgcggcgatggttcctggctcttcgatccggaacgctacctcgatggtttagctgacgcaaaacgaggatcctacggtcattcagc

SEQ ID NO: 1541 - DNA, 158 bp, synthetic construct
  misc_feature 1..158: note = Synthetic nucleic acid
  source 1..158: mol_type = other DNA
cagacgacggccagtgtcgacatgtcagactatcaaatgtttgaagtacaggtgagccaggttgaaaacacttcttgcggcgatggttcctggctcttcgatcgtgcgaagggtaaacgcctggtgttggatttgttcggatcctacggtcattcagc

SEQ ID NO: 1542 - DNA, 158 bp, synthetic construct
  misc_feature 1..158: note = Synthetic nucleic acid
  source 1..158: mol_type = other DNA
cagacgacggccagtgtcgacatgattaagaaaatcggtgtgttgacaagcggcggtgatgcaacacttcttgcggcgatggttcctggctcttcgatcaaaggtgactggctggactgcgcgaaaaaactgtataaaggatcctacggtcattcagc

SEQ ID NO: 1543 - DNA, 158 bp, synthetic construct
  misc_feature 1..158: note = Synthetic nucleic acid
  source 1..158: mol_type = other DNA
cagacgacggccagtgtcgacatgcgtagcgcgcaggtataccgctggcagatccccataacacttcttgcggcgatggttcctggctcttcgatcctgcctgtcgtggaagttgatgcactggagcggttgttattaggatcctacggtcattcagc

SEQ ID NO: 1544 - DNA, 158 bp, synthetic construct
  misc_feature 1..158: note = Synthetic nucleic acid
  source 1..158: mol_type = other DNA
cagacgacggccagtgtcgacatgcgtcagactaaaaccggtatcctgctggcaaacaacacttcttgcggcgatggttcctggctcttcgatcaacatatcgaaatgatggctaatcttgttgccgcgtatcgcgctggatcctacggtcattcagc

SEQ ID NO: 1545 - DNA, 158 bp, synthetic construct
  misc_feature 1..158: note = Synthetic nucleic acid
  source 1..158: mol_type = other DNA
cagacgacggccagtgtcgacatggactatcgcaaaatcattaaagagatcgggcgcgggaaaaaccaaacacttcttgcggcgatggttcctggctcttcgatcgacggcctggcgcgcgttaatcaggcatttcctggatcctacggtcattcagc

SEQ ID NO: 1546 - DNA, 158 bp, synthetic construct
  misc_feature 1..158: note = Synthetic nucleic acid
  source 1..158: mol_type = other DNA
cagacgacggccagtgtcgacatggcaatttcatcgcgtaacacacttcttgccgcactgaacacttcttgcggcgatggttcctggctcttcgatcatgattacagccagtacgttacctcgcgcttcgtgcaagaaggatcctacggtcattcagc

SEQ ID NO: 1547 - DNA, 158 bp, synthetic construct
  misc_feature 1..158: note = Synthetic nucleic acid
  source 1..158: mol_type = other DNA
cagacgacggccagtgtcgacgtgaatataaccgcgctgacagacaatacgcagggaacacttcttgcggcgatggttcctggctcttcgatcaccgtcaaaaacatcgcatttaactatattgtgaggcttgcaggcggatcctacggtcattcagc

SEQ ID NO: 1548 - DNA, 158 bp, synthetic construct
  misc_feature 1..158: note = Synthetic nucleic acid
  source 1..158: mol_type = other DNA
cagacgacggccagtgtcgacgtgatgatcaaaacgcgtttttctcgctggctaacgttttttacgttaacacttcttgcggcgatggttcctggctcttcgatccgccgtcatcaagtgagcccacaaacgctggggggatcctacggtcattcagc

SEQ ID NO: 1549 - DNA, 158 bp, synthetic construct
  misc_feature 1..158: note = Synthetic nucleic acid
  source 1..158: mol_type = other DNA
cagacgacggccagtgtcgacatgaaaacagagactccatccgtaaaaattgttgctatcaccgctgacaacacttcttgcggcgatggttcctggctcttcgatcgttgtttgcaaaagctgcgtaacgcgcgcgtgggatcctacggtcattcagc

SEQ ID NO: 1550 - DNA, 158 bp, synthetic construct
  misc_feature 1..158: note = Synthetic nucleic acid
  source 1..158: mol_type = other DNA
cagacgacggccagtgtcgacatgaaactctcacgtatcagcgccatcaactggaacaaaacacttcttgcggcgatggttcctggctcttcgatcgggaaagcggttgaaacagaagatgaagactggaatttcccgggatcctacggtcattcagc

SEQ ID NO: 1551 - DNA, 158 bp, synthetic construct
  misc_feature 1..158: note = Synthetic nucleic acid
  source 1..158: mol_type = other DNA
cagacgacggccagtgtcgacatgaagaaatccatcaccacgcttgatctcaatctgctgctttaacacttcttgcggcgatggttcctggctcttcgatcggaaaccattaaaaacctttacgcgtcgatggcaggaggatcctacggtcattcagc

SEQ ID NO: 1552 - DNA, 158 bp, synthetic construct
  misc_feature 1..158: note = Synthetic nucleic acid
  source 1..158: mol_type = other DNA
cagacgacggccagtgtcgacatgaagccggaaaacaaactacctgttctggaccttatttctgctgaaataacacttcttgcggcgatggttcctggctcttcgatcggcgctcagttctttaccgctcagcttataggatcctacggtcattcagc

SEQ ID NO: 1553 - DNA, 158 bp, synthetic construct
  misc_feature 1..158: note = Synthetic nucleic acid
  source 1..158: mol_type = other DNA
cagacgacggccagtgtcgacatgacgcatattcggatcgaaaaaggaacgggtggctaacacttcttgcggcgatggttcctggctcttcgatctgtactgatcgcctggtttgtctccggttttatctatcaattgggatcctacggtcattcagc

SEQ ID NO: 1554 - DNA, 158 bp, synthetic construct
  misc_feature 1..158: note = Synthetic nucleic acid
  source 1..158: mol_type = other DNA
cagacgacggccagtgtcgacatgagtctgaatttccttgattttgaacagccgattgcagagctgaacacttcttgcggcgatggttcctggctcttcgatcgttatcagcgcctgatgagctacggttacgcgctcggatcctacggtcattcagc

SEQ ID NO: 1555 - DNA, 158 bp, synthetic construct
  misc_feature 1..158: note = Synthetic nucleic acid
  source 1..158: mol_type = other DNA
cagacgacggccagtgtcgacatgcgggttttgatcgttaaaacatcgtcgatgggcaacacttcttgcggcgatggttcctggctcttcgatcacctcaacagtcaagcagttttggaaaagttatcatcattattgggatcctacggtcattcagc

SEQ ID NO: 1556 - DNA, 158 bp, synthetic construct
  misc_feature 1..158: note = Synthetic nucleic acid
  source 1..158: mol_type = other DNA
cagacgacggccagtgtcgacatgcgtaacatcattaaactggcgctggcgggattgcttaaacacttcttgcggcgatggttcctggctcttcgatccatctggcagcccactcaactggaaggaaaacaattagccggatcctacggtcattcagc

SEQ ID NO: 1557 - DNA, 158 bp, synthetic construct
  misc_feature 1..158: note = Synthetic nucleic acid
  source 1..158: mol_type = other DNA
cagacgacggccagtgtcgacatggctgcaaccaagcctgcttttaacccaccgggtaaaaaaacacttcttgcggcgatggttcctggctcttcgatcatgattatgcgcctggctaagaatgagggggcacgctttggatcctacggtcattcagc

SEQ ID NO: 1558 - DNA, 158 bp, synthetic construct
  misc_feature 1..158: note = Synthetic nucleic acid
  source 1..158: mol_type = other DNA
cagacgacggccagtgtcgacgtggcacaacgagattatgtacgccgcagccaaccggcaccttaacacttcttgcggcgatggttcctggctcttcgatctcatacaaactgcattcggctcgccgccgggggtggatcctacggtcattcagccgc

SEQ ID NO: 1559 - DNA, 158 bp, synthetic construct
  misc_feature 1..158: note = Synthetic nucleic acid
  source 1..158: mol_type = other DNA
cagacgacggccagtgtcgacttgtttccatttcgtcgtaacgttcttgcatttgccgctctgttaacacttcttgcggcgatggttcctggctcttcgatccccgaagcggcgaagtttaacgctagcgcaaattcaggatcctacggtcattcagc

SEQ ID NO: 1560 - DNA, 158 bp, synthetic construct
  misc_feature 1..158: note = Synthetic nucleic acid
  source 1..158: mol_type = other DNA
cagacgacggccagtgtcgacatgaaaattgcgctggttattttcatcacccttgccctggcgaacacttcttgcggcgatggttcctggctcttcgatccgccgtggtttgtctggttgcttgtgagaatgcgacttggatcctacggtcattcagc

SEQ ID NO: 1561 - DNA, 158 bp, synthetic construct
  misc_feature 1..158: note = Synthetic nucleic acid
  source 1..158: mol_type = other DNA
cagacgacggccagtgtcgacatgaacccgattgcagttaccctactcaccggttttttaggcgcaaacacttcttgcggcgatggttcctggctcttcgatcagattcgggctgcgtttgcggggttgaggaaggaaggatcctacggtcattcagc

SEQ ID NO: 1562 - DNA, 158 bp, synthetic construct
  misc_feature 1..158: note = Synthetic nucleic acid
  source 1..158: mol_type = other DNA
cagacgacggccagtgtcgacatgaagcaactttggtttgccatgtcattagtgacaggtagcctaacacttcttgcggcgatggttcctggctcttcgatcattgccgagaatattaagttcggggcagcgcaagttggatcctacggtcattcagc

SEQ ID NO: 1563 - DNA, 158 bp, synthetic construct
  misc_feature 1..158: note = Synthetic nucleic acid
  source 1..158: mol_type = other DNA
cagacgacggccagtgtcgacatgaaggcgtttacctatgaacgagtgaataccccagccgaggcgaacacttcttgcggcgatggttcctggctcttcgatccctccgtactggctgaagcgagggcacaggcaaatggatcctacggtcattcagc

SEQ ID NO: 1564 - DNA, 158 bp, synthetic construct
  misc_feature 1..158: note = Synthetic nucleic acid
  source 1..158: mol_type = other DNA
cagacgacggccagtgtcgacatgacgcagacttccgcatttcattttgaatcgctggtgtggaacacttcttgcggcgatggttcctggctcttcgatcttttcattctctacgccggacagttgacggtggcggacggatcctacggtcattcagc

SEQ ID NO: 1565 - DNA, 158 bp, synthetic construct
  misc_feature 1..158: note = Synthetic nucleic acid
  source 1..158: mol_type = other DNA
cagacgacggccagtgtcgacatgagtaaatcacacccgcgctggcgcttagcaaagaagatcaacacttcttgcggcgatggttcctggctcttcgatccgaagaagctacgggcgaaaaatgaagcggcgatgtcgggatcctacggtcattcagc

SEQ ID NO: 1566 - DNA, 158 bp, synthetic construct
  misc_feature 1..158: note = Synthetic nucleic acid
  source 1..158: mol_type = other DNA
cagacgacggccagtgtcgacatgctacaaaattgcgcacaatcaaattgccgcattattcctaagaaattaaacacttcttgcggcgatggttcctggctcttcgatccaagaatgcgggcgatgcaggggaatatcggatcctacggtcattcagc

SEQ ID NO: 1567 - DNA, 158 bp, synthetic construct
  misc_feature 1..158: note = Synthetic nucleic acid
  source 1..158: mol_type = other DNA
cagacgacggccagtgtcgacatgtcatacccgctttttgacaaagacgaacactggcataagccagaaacacttcttgcggcgatggttcctggctcttcgatcgaggaggattcatgcctgcccccgtcgtccacaggatcctacggtcattcagc

SEQ ID NO: 1568 - DNA, 158 bp, synthetic construct
  misc_feature 1..158: note = Synthetic nucleic acid
  source 1..158: mol_type = other DNA
cagacgacggccagtgtcgacatgtggaaacgcttacttatagtctctgcagtctcggcaaacacttcttgcggcgatggttcctggctcttcgatccaaaagaagaattagagaagaagaaaaatatggggtatccgggatcctacggtcattcagc

SEQ ID NO: 1569 - DNA, 158 bp, synthetic construct
  misc_feature 1..158: note = Synthetic nucleic acid
  source 1..158: mol_type = other DNA
cagacgacggccagtgtcgacgtgagactcgccccgctctaccgcaacgcccttaacacttcttgcggcgatggttcctggctcttcgatcactacagcgccatgcaagtgctggataggcttaaggcgctgtttaccggatcctacggtcattcagc

SEQ ID NO: 1570 - DNA, 158 bp, synthetic construct
  misc_feature 1..158: note = Synthetic nucleic acid
  source 1..158: mol_type = other DNA
cagacgacggccagtgtcgacatgaagcatgaattatcaagtatgaaggcatttgtcatactggcagagtcaacacttcttgcggcgatggttcctggctcttcgatccagagacacgcgttacaggagataggtttcggatcctacggtcattcagc

SEQ ID NO: 1571 - DNA, 158 bp, synthetic construct
  misc_feature 1..158: note = Synthetic nucleic acid
  source 1..158: mol_type = other DNA
cagacgacggccagtgtcgacatgaatcctttgttaaccgattcccgccgtcaggcaacacttcttgcggcgatggttcctggctcttcgatcattcagtctattacgcggtactggataaacatttcaccactggtcggatcctacggtcattcagc

SEQ ID NO: 1572 - DNA, 158 bp, synthetic construct
  misc_feature 1..158: note = Synthetic nucleic acid
  source 1..158: mol_type = other DNA
cagacgacggccagtgtcgacatgacaatcaacgattcggcaatttcagaacagggaatgtgtgaaaacacttcttgcggcgatggttcctggctcttcgatcatcaggacacagcagcggcgattttacgtagtggatcctacggtcattcagccgc

SEQ ID NO: 1573 - DNA, 158 bp, synthetic construct
  misc_feature 1..158: note = Synthetic nucleic acid
  source 1..158: mol_type = other DNA
cagacgacggccagtgtcgacatgacggacaaattgacctcccttcgtcagtacaccacaacacttcttgcggcgatggttcctggctcttcgatcgaccaggaaaaactggaaaaaatgatcggcgatctgctgttcggatcctacggtcattcagc

SEQ ID NO: 1574 - DNA, 158 bp, synthetic construct
  misc_feature 1..158: note = Synthetic nucleic acid
  source 1..158: mol_type = other DNA
cagacgacggccagtgtcgacatgagtacacttgaacctgctgcccagtcgaaaccgccaacacttcttgcggcgatggttcctggctcttcgatcttccacaaacaccagcaaaaaagcgtgggagaacacggaaatggatcctacggtcattcagc

SEQ ID NO: 1575 - DNA, 158 bp, synthetic construct
  misc_feature 1..158: note = Synthetic nucleic acid
  source 1..158: mol_type = other DNA
cagacgacggccagtgtcgacatgatcgaagtaaaacacctgaaaacgctacaagcgttgcggaactgcgaacacttcttgcggcgatggttcctggctcttcgatcagtgaggccaggatcaccagcgcgcctgccaggatcctacggtcattcagc

SEQ ID NO: 1576 - DNA, 158 bp, synthetic construct
  misc_feature 1..158: note = Synthetic nucleic acid
  source 1..158: mol_type = other DNA
cagacgacggccagtgtcgacatgcgggcgaaacttctgggaatagtcctgacaaaacacttcttgcggcgatggttcctggctcttcgatcaaactataacttcatcactactgctggtcttaagtacacatttaagggatcctacggtcattcagc

SEQ ID NO: 1577 - DNA, 158 bp, synthetic construct
  misc_feature 1..158: note = Synthetic nucleic acid
  source 1..158: mol_type = other DNA
cagacgacggccagtgtcgacatgtatacgaagattattggtactggcagctatctgcccgaacaagtgcgaacacttcttgcggcgatggttcctggctcttcgatcacctggggctccgcgctggttcgtttctgtggatcctacggtcattcagc

SEQ ID NO: 1578 - DNA, 158 bp, synthetic construct
  misc_feature 1..158: note = Synthetic nucleic acid
  source 1..158: mol_type = other DNA
cagacgacggccagtgtcgacatgaaagagcttgtggtcgttgccattggtggcaacagcattataacacttcttgcggcgatggttcctggctcttcgatccgcggcgaaacgggcactcatattattaaaacgcttggatcctacggtcattcagc

SEQ ID NO: 1579 - DNA, 158 bp, synthetic construct
  misc_feature 1..158: note = Synthetic nucleic acid
  source 1..158: mol_type = other DNA
cagacgacggccagtgtcgacatgaacgagttagacggcatcaaacagttcaccactgtcgtaacacttcttgcggcgatggttcctggctcttcgatccaacgcaaactggaagatcttcttgccgccaaactagaaggatcctacggtcattcagc

SEQ ID NO: 1580 - DNA, 158 bp, synthetic construct
  misc_feature 1..158: note = Synthetic nucleic acid
  source 1..158: mol_type = other DNA
cagacgacggccagtgtcgacatgagtaaacttgatacttttatccaacatgctgtaaacgctgttccggtaacacttcttgcggcgatggttcctggctcttcgatccaggaggcgttatgccaatttatcagaacgggatcctacggtcattcagc

SEQ ID NO: 1581 - DNA, 158 bp, synthetic construct
  misc_feature 1..158: note = Synthetic nucleic acid
  source 1..158: mol_type = other DNA
cagacgacggccagtgtcgacatgagtaagcgtaaagtcgccattatcggttctggcaacattggtaccgatctaacacttcttgcggcgatggttcctggctcttcgatcgcgcgcaaggcaggagaagcggcaacgggatcctacggtcattcagc

SEQ ID NO: 1582 - DNA, 158 bp, synthetic construct
  misc_feature 1..158: note = Synthetic nucleic acid
  source 1..158: mol_type = other DNA
cagacgacggccagtgtcgacatgagtataaaagagcaaacgttaatgacgccttacctacagtttgaccaacacttcttgcggcgatggttcctggctcttcgatctgcggtagaagaggtcagactacgcaaacccggatcctacggtcattcagc

SEQ ID NO: 1583 - DNA, 158 bp, synthetic construct
  misc_feature 1..158: note = Synthetic nucleic acid
  source 1..158: mol_type = other DNA
cagacgacggccagtgtcgacatgagtgatatcagtaaggcgagcctgcctaaggcgatttttttaacacttcttgcggcgatggttcctggctcttcgatcgaagtattacaggttgttggtgctatcgcaggcgtgggatcctacggtcattcagc

SEQ ID NO: 1584 - DNA, 158 bp, synthetic construct
  misc_feature 1..158: note = Synthetic nucleic acid
  source 1..158: mol_type = other DNA
cagacgacggccagtgtcgacatgatcaagctcggcatcgtgatggaccccatcgcaaaaacacttcttgcggcgatggttcctggctcttcgatcatgttaatggatgccatcgaagcacgtttacagcagcagaagggatcctacggtcattcagc

SEQ ID NO: 1585 - DNA, 158 bp, synthetic construct
  misc_feature 1..158: note = Synthetic nucleic acid
  source 1..158: mol_type = other DNA
cagacgacggccagtgtcgacatgcagatcctgttggccaacccgcgtggtttttgtaacacttcttgcggcgatggttcctggctcttcgatcaagtgccgaaagagctgcgtgtcgatattcgtgaagtcgatactggatcctacggtcattcagc

SEQ ID NO: 1586 - DNA, 158 bp, synthetic construct
  misc_feature 1..158: note = Synthetic nucleic acid
  source 1..158: mol_type = other DNA
cagacgacggccagtgtcgacatgctgagcgcatttcaactggaaaataaccgactgaccaacacttcttgcggcgatggttcctggctcttcgatctggcaccgtatctgtactttaagcggaagaactggttgaagggatcctacggtcattcagc

SEQ ID NO: 1587 - DNA, 158 bp, synthetic construct
  misc_feature 1..158: note = Synthetic nucleic acid
  source 1..158: mol_type = other DNA
cagacgacggccagtgtcgacatggctatgtatcagaacatgctcgttgttatcgatcctaaccagaacacttcttgcggcgatggttcctggctcttcgatccacccgttgaactggatgacgaagaagacgataggggatcctacggtcattcagc

SEQ ID NO: 1588 - DNA, 158 bp, synthetic construct
  misc_feature 1..158: note = Synthetic nucleic acid
  source 1..158: mol_type = other DNA
cagacgacggccagtgtcgacgtgaatttccaacaactaaagataatccgcgaggctgcacaacacttcttgcggcgatggttcctggctcttcgatcgatggaaagcagtgaagaggaaattgattatcagatacagggatcctacggtcattcagc

SEQ ID NO: 1589 - DNA, 158 bp, synthetic construct
  misc_feature 1..158: note = Synthetic nucleic acid
  source 1..158: mol_type = other DNA
cagacgacggccagtgtcgacatgagacaaactctttgcgacggatatctggtcatttttgcgttaaacacttcttgcggcgatggttcctggctcttcgatccgcttgcatgggtcttctggttaaccggtctggggggatcctacggtcattcagc

SEQ ID NO: 1590 - DNA, 158 bp, synthetic construct
  misc_feature 1..158: note = Synthetic nucleic acid
  source 1..158: mol_type = other DNA
cagacgacggccagtgtcgacatgagactcaggaaatacaataaaagtttgggatggttgtcattatttgcaggaacacttcttgcggcgatggttcctggctcttcgatcatgagccacgcggaatccgcccatctcggatcctacggtcattcagc

SEQ ID NO: 1591 - DNA, 158 bp, synthetic construct
  misc_feature 1..158: note = Synthetic nucleic acid
  source 1..158: mol_type = other DNA
cagacgacggccagtgtcgacatgcaaaatcggctgaccatcaaagatatcgcgcgcttaagcgaacacttcttgcggcgatggttcctggctcttcgatcaccgcaacaaatcatcatccccgccaccctgtccatcggatcctacggtcattcagc

SEQ ID NO: 1592 - DNA, 158 bp, synthetic construct
  misc_feature 1..158: note = Synthetic nucleic acid
  source 1..158: mol_type = other DNA
cagacgacggccagtgtcgacatgcgtgtgttactggcaccgatggagggagtaacacttcttgcggcgatggttcctggctcttcgatccctgatattgcaagggctattcaggcaattgatatcgagaaactctttggatcctacggtcattcagc

SEQ ID NO: 1593 - DNA, 158 bp, synthetic construct
  misc_feature 1..158: note = Synthetic nucleic acid
  source 1..158: mol_type = other DNA
cagacgacggccagtgtcgacgtgcctgatatgaagctttttgctggtaacgccaccaacacttcttgcggcgatggttcctggctcttcgatcgtatcagcaacgaagaatcgatctctgccatgttcgaacacactggatcctacggtcattcagc

SEQ ID NO: 1594 - DNA, 158 bp, synthetic construct
  misc_feature 1..158: note = Synthetic nucleic acid
  source 1..158: mol_type = other DNA
cagacgacggccagtgtcgacgtgtcagaatcactacgtattatttttgcgggtacacctgactttgcaaacacttcttgcggcgatggttcctggctcttcgatcaatggtttgttccgggcaaccgtctggtctcaggatcctacggtcattcagc

SEQ ID NO: 1595 - DNA, 158 bp, synthetic construct
  misc_feature 1..158: note = Synthetic nucleic acid
  source 1..158: mol_type = other DNA
cagacgacggccagtgtcgacttgcttgcggactggttcagtgagcaattctcaacgggaacacttcttgcggcgatggttcctggctcttcgatcaaccgtaccagcactatgcgttacggtgaggaagttgtcctcggatcctacggtcattcagc

SEQ ID NO: 1596 - DNA, 158 bp, synthetic construct
  misc_feature 1..158: note = Synthetic nucleic acid
  source 1..158: mol_type = other DNA
cagacgacggccagtgtcgacatgaagcttaagaacaccctcctggcgtcggcaaacacttcttgcggcgatggttcctggctcttcgatcaggaacgtggtaataacctgaccgtcagcgcagatctgtataaactgggatcctacggtcattcagc

SEQ ID NO: 1597 - DNA, 158 bp, synthetic construct
  misc_feature 1..158: note = Synthetic nucleic acid
  source 1..158: mol_type = other DNA
cagacgacggccagtgtcgacatgagtcgtcctcgtcgtcgcggtcgcgacattaacggcgttttaacacttcttgcggcgatggttcctggctcttcgatcgcgcctcgtcgcctggtggttgaatacccggcgggatcctacggtcattcagccgc

SEQ ID NO: 1598 - DNA, 158 bp, synthetic construct
  misc_feature 1..158: note = Synthetic nucleic acid
  source 1..158: mol_type = other DNA
cagacgacggccagtgtcgacatgcacgcttatcttcactgtctttcccactcgccgctaacacttcttgcggcgatggttcctggctcttcgatcattgccggatttggctcgttaagcgccagaacagagaacttgggatcctacggtcattcagc

SEQ ID NO: 1599 - DNA, 158 bp, synthetic construct
  misc_feature 1..158: note = Synthetic nucleic acid
  source 1..158: mol_type = other DNA
cagacgacggccagtgtcgacatgttgcgttacgtattacgccgctttctgctgctgatcccgatggtaacacttcttgcggcgatggttcctggctcttcgatccgcattcgtcgtcatgaaggagcgcacgcgacaggatcctacggtcattcagc

SEQ ID NO: 1600 - DNA, 158 bp, synthetic construct
  misc_feature 1..158: note = Synthetic nucleic acid
  source 1..158: mol_type = other DNA
cagacgacggccagtgtcgacatgaacacgttttctcaagtctgggtattcagcgataccccttctcgtctgcaacacttcttgcggcgatggttcctggctcttcgatcggcgctgaccgcagctttagcgcgtaggggatcctacggtcattcagc

SEQ ID NO: 1601 - DNA, 158 bp, synthetic construct
  misc_feature 1..158: note = Synthetic nucleic acid
  source 1..158: mol_type = other DNA
cagacgacggccagtgtcgacatgaagctgatacgcggcatacataatctcagccaggccccgaacacttcttgcggcgatggttcctggctcttcgatcccgcccgcgaattttttgggctaacaaaaccggctatcggatcctacggtcattcagc

SEQ ID NO: 1602 - DNA, 158 bp, synthetic construct
  misc_feature 1..158: note = Synthetic nucleic acid
  source 1..158: mol_type = other DNA
cagacgacggccagtgtcgacatgatcagcgacagcaaactactggcaagtgcgaacacttcttgcggcgatggttcctggctcttcgatcacaaggtgagcaaaacctacagtatgaacattgataatctgttcttgggatcctacggtcattcagc

SEQ ID NO: 1603 - DNA, 158 bp, synthetic construct
  misc_feature 1..158: note = Synthetic nucleic acid
  source 1..158: mol_type = other DNA
cagacgacggccagtgtcgacatgatggaaaactataaacatactacggtgctgctggatgaagccaacacttcttgcggcgatggttcctggctcttcgatccagttctgcgtattgcagagaggacgaatgcaatcggatcctacggtcattcagc

SEQ ID NO: 1604 - DNA, 158 bp, synthetic construct
  misc_feature 1..158: note = Synthetic nucleic acid
  source 1..158: mol_type = other DNA
cagacgacggccagtgtcgacatgcgcgaaaaggattatgtcgtaattataggttcggcgaatattgataacacttcttgcggcgatggttcctggctcttcgatccgttagtggagaacgcagaatgtctgaatagaggatcctacggtcattcagc

SEQ ID NO: 1605 - DNA, 158 bp, synthetic construct
  misc_feature 1..158: note = Synthetic nucleic acid
  source 1..158: mol_type = other DNA
cagacgacggccagtgtcgacatggaaaagagaaaaattattctggattgtgatccgggtcatgatgatgctattaacacttcttgcggcgatggttcctggctcttcgatctgcgcggctacatcaaaacccatccgggatcctacggtcattcagc

SEQ ID NO: 1606 - DNA, 158 bp, synthetic construct
  misc_feature 1..158: note = Synthetic nucleic acid
  source 1..158: mol_type = other DNA
cagacgacggccagtgtcgacatggcgatgaatgtattgcaatcaccttcacgtccaggtctggaacacttcttgcggcgatggttcctggctcttcgatcgttcgtgaaacgtctgggagcgttcgatgcactccgtggatcctacggtcattcagc

SEQ ID NO: 1607 - DNA, 158 bp, synthetic construct
  misc_feature 1..158: note = Synthetic nucleic acid
  source 1..158: mol_type = other DNA
cagacgacggccagtgtcgacatggcgcactcacactcacacacgtcctcacacctaacacttcttgcggcgatggttcctggctcttcgatccacctgaatgaaggggtgtctggccattcacatcatcaccatcgaggatcctacggtcattcagc

SEQ ID NO: 1608 - DNA, 158 bp, synthetic construct
  misc_feature 1..158: note = Synthetic nucleic acid
  source 1..158: mol_type = other DNA
cagacgacggccagtgtcgacatgttagacaatgttttaagaattgccacacgccaaagcccacttgcaaacacttcttgcggcgatggttcctggctcttcgatcctgaagtctataacggagacgccccggcagtaggatcctacggtcattcagc

SEQ ID NO: 1609 - DNA, 158 bp, synthetic construct
  misc_feature 1..158: note = Synthetic nucleic acid
  source 1..158: mol_type = other DNA
cagacgacggccagtgtcgacatgaaagtcgcagtcctcggcgctgctggcggtattaacacttcttgcggcgatggttcctggctcttcgatctgaagaaagatatcgccctgggcgaagagttcgttaataagcaaggatcctacggtcattcagc

SEQ ID NO: 1610 - DNA, 158 bp, synthetic construct
  misc_feature 1..158: note = Synthetic nucleic acid
  source 1..158: mol_type = other DNA
cagacgacggccagtgtcgacatgagcactattcttcttccgaaaacgcagcacctggtaaacacttcttgcggcgatggttcctggctcttcgatcataatgggtgtagacgaaggcaattaatagaagttggtataggatcctacggtcattcagc

SEQ ID NO: 1611 - DNA, 158 bp, synthetic construct
  misc_feature 1..158: note = Synthetic nucleic acid
  source 1..158: mol_type = other DNA
cagacgacggccagtgtcgacatgagtcaattaaacagcgtctgggtctttagcgataatcctgaacgttataacacttcttgcggcgatggttcctggctcttcgatcctgccctgattagccagttgagccgcttaggatcctacggtcattcagc

SEQ ID NO: 1612 - DNA, 158 bp, synthetic construct
  misc_feature 1..158: note = Synthetic nucleic acid
  source 1..158: mol_type = other DNA
cagacgacggccagtgtcgacatgataagtgcaaatcgtccgataattaacctcgacctcgatctgaacacttcttgcggcgatggttcctggctcttcgatcatgattcattgttgattgaaagggatatcgagttaggatcctacggtcattcagc

SEQ ID NO: 1613 - DNA, 158 bp, synthetic construct
  misc_feature 1..158: note = Synthetic nucleic acid
  source 1..158: mol_type = other DNA
cagacgacggccagtgtcgacatgtctgaattaaaaatttcccctgaattattacaaatttccccggaagtgcaaacacttcttgcggcgatggttcctggctcttcgatcaaagaatatcagcgtctcgcgggtaatggatcctacggtcattcagc

SEQ ID NO: 1614 - DNA, 158 bp, synthetic construct
  misc_feature 1..158: note = Synthetic nucleic acid
  source 1..158: mol_type = other DNA
cagacgacggccagtgtcgacatgttacccaggatcagacacaataattttattggtgcggtggaaacacttcttgcggcgatggttcctggctcttcgatcccagtattagttcggcgtaagaactcagagacttttggatcctacggtcattcagc

SEQ ID NO: 1615 - DNA, 158 bp, synthetic construct
  misc_feature 1..158: note = Synthetic nucleic acid
  source 1..158: mol_type = other DNA
cagacgacggccagtgtcgacatgaataaatatctgaaatatttcagcggcacactcgtgggcttaatgttaacacttcttgcggcgatggttcctggctcttcgatcctggtcgattcaatcctggtcactcaatggggatcctacggtcattcagc

SEQ ID NO: 1616 - DNA, 158 bp, synthetic construct
  misc_feature 1..158: note = Synthetic nucleic acid
  source 1..158: mol_type = other DNA
cagacgacggccagtgtcgacatggaaccccttcgtgaaataagaaatcggctgcttaacgaacacttcttgcggcgatggttcctggctcttcgatctattatctggctaagagaacaggtaaaaaccacttcaattggatcctacggtcattcagc

SEQ ID NO: 1617 - DNA, 158 bp, synthetic construct
  misc_feature 1..158: note = Synthetic nucleic acid
  source 1..158: mol_type = other DNA
cagacgacggccagtgtcgacatggcactgccaattctgttagattgcgacccaggtaacacttcttgcggcgatggttcctggctcttcgatcgctttgttgatttactggctgatcgtctgaaattttacgctcttggatcctacggtcattcagc

SEQ ID NO: 1618 - DNA, 158 bp, synthetic construct
  misc_feature 1..158: note = Synthetic nucleic acid
  source 1..158: mol_type = other DNA
cagacgacggccagtgtcgacatggccgccgttaacttacgtcatattgaaatttttcatgcgaacacttcttgcggcgatggttcctggctcttcgatcctcttgacgctattttgtcgtcagctacgacagcactgggatcctacggtcattcagc

SEQ ID NO: 1619 - DNA, 158 bp, synthetic construct
  misc_feature 1..158: note = Synthetic nucleic acid
  source 1..158: mol_type = other DNA
cagacgacggccagtgtcgacatggctaatccgctatatcagaaacatatcatttccataaacgaccttagtcgaacacttcttgcggcgatggttcctggctcttcgatcgttctgaatcgcgatctggtactgctcggatcctacggtcattcagc

SEQ ID NO: 1620 - DNA, 158 bp, synthetic construct
  misc_feature 1..158: note = Synthetic nucleic acid
  source 1..158: mol_type = other DNA
cagacgacggccagtgtcgacatgaactcaatttttaccgaagagaatctgttggcatttactaccgctaacacttcttgcggcgatggttcctggctcttcgatctctatcaggatttactgcatcgggagaatcccggatcctacggtcattcagc

SEQ ID NO: 1621 - DNA, 158 bp, synthetic construct
  misc_feature 1..158: note = Synthetic nucleic acid
  source 1..158: mol_type = other DNA
cagacgacggccagtgtcgacatgagtaagaaaattgttctcgccctgggcgggaatgaacacttcttgcggcgatggttcctggctcttcgatcagaagggattgaaggcaaaacaggaacggtgatttgtcagccgggatcctacggtcattcagc

SEQ ID NO: 1622 - DNA, 158 bp, synthetic construct
  misc_feature 1..158: note = Synthetic nucleic acid
  source 1..158: mol_type = other DNA
cagacgacggccagtgtcgacatgatcatcgttaccggcggcgcgggctttatcggcaaacacttcttgcggcgatggttcctggctcttcgatcaggtgtaacggaatacatggcctggctgaatcgcgacgcaaatggatcctacggtcattcagc

SEQ ID NO: 1623 - DNA, 158 bp, synthetic construct
  misc_feature 1..158: note = Synthetic nucleic acid
  source 1..158: mol_type = other DNA
cagacgacggccagtgtcgacatgccgaaatttcgagtttctttatttagcctggccctgatgctggctgtgaacacttcttgcggcgatggttcctggctcttcgatccggcggggcagacggcacagaacgatagtggatcctacggtcattcagc

SEQ ID NO: 1624 - DNA, 158 bp, synthetic construct
  misc_feature 1..158: note = Synthetic nucleic acid
  source 1..158: mol_type = other DNA
cagacgacggccagtgtcgacatgcgtcgtgtaaatattctttgctcatttgctctgctttttgcaacacttcttgcggcgatggttcctggctcttcgatcgtgcaaattagttctggttcaagacagatgttttgcggatcctacggtcattcagc

SEQ ID NO: 1625 - DNA, 158 bp, synthetic construct
  misc_feature 1..158: note = Synthetic nucleic acid
  source 1..158: mol_type = other DNA
cagacgacggccagtgtcgacatgctgaagattattcgtgcgggcatgtataccactgtaacacttcttgcggcgatggttcctggctcttcgatctattttgaacaattagcgtggcggctgcacaatgaaaatgagggatcctacggtcattcagc

SEQ ID NO: 1626 - DNA, 158 bp, synthetic construct
  misc_feature 1..158: note = Synthetic nucleic acid
  source 1..158: mol_type = other DNA
cagacgacggccagtgtcgacatgctgaatagctggcctttagccaaagacttgcaggtactggtaaacacttcttgcggcgatggttcctggctcttcgatctgggcaagcccgatgaaggctatcaggtcatgaaaggatcctacggtcattcagc

SEQ ID NO: 1627 - DNA, 158 bp, synthetic construct
  misc_feature 1..158: note = Synthetic nucleic acid
  source 1..158: mol_type = other DNA
cagacgacggccagtgtcgacatggttaaagtttatgccccggcttccagtgccaatatgagcgtaacacttcttgcggcgatggttcctggctcttcgatcctggatacggcgggcgcacgagtactggaaaacgttggatcctacggtcattcagc

SEQ ID NO: 1628 - DNA, 158 bp, synthetic construct
  misc_feature 1..158: note = Synthetic nucleic acid
  source 1..158: mol_type = other DNA
cagacgacggccagtgtcgacatgtggtcagaatattcactcgaagttgttgatgcggtagcgcgtaataacacttcttgcggcgatggttcctggctcttcgatcagccggaagagactcccgcaacgggtgatcccggatcctacggtcattcagc

SEQ ID NO: 1629 - DNA, 158 bp, synthetic construct
  misc_feature 1..158: note = Synthetic nucleic acid
  source 1..158: mol_type = other DNA
cagacgacggccagtgtcgacatgttacataaaaaaacgcttcttttcgcagcattatccgccgctaacacttcttgcggcgatggttcctggctcttcgatcccaaccagtatgcgagctgcctgaaaggagatcgaggatcctacggtcattcagc

SEQ ID NO: 1630 - DNA, 158 bp, synthetic construct
  misc_feature 1..158: note = Synthetic nucleic acid
  source 1..158: mol_type = other DNA
cagacgacggccagtgtcgacatgttagatgcaaacaaattacagcaggcagtggatcaggcttaaacacttcttgcggcgatggttcctggctcttcgatcgctaagcaactcggctataacgtgtttaagggcagtggatcctacggtcattcagc

SEQ ID NO: 1631 - DNA, 158 bp, synthetic construct
  misc_feature 1..158: note = Synthetic nucleic acid
  source 1..158: mol_type = other DNA
cagacgacggccagtgtcgacgtgaaaacactaataagaaaattctcccgtacggccatcacggtcgtattaaacacttcttgcggcgatggttcctggctcttcgatctggcccatcgcctgcgtgagtttggttggggatcctacggtcattcagc

SEQ ID NO: 1632 - DNA, 158 bp, synthetic construct
  misc_feature 1..158: note = Synthetic nucleic acid
  source 1..158: mol_type = other DNA
cagacgacggccagtgtcgacatgaaaccactgctggatgtgttgatgatcctcgatgcaacacttcttgcggcgatggttcctggctcttcgatcggtgtttatgcaaaatctgatgacggaaaatcagccattaaaggatcctacggtcattcagc

SEQ ID NO: 1633 - DNA, 158 bp, synthetic construct
  misc_feature 1..158: note = Synthetic nucleic acid
  source 1..158: mol_type = other DNA
cagacgacggccagtgtcgacatgaccacgaagaaagctgattacatttggttcaatggggaaacacttcttgcggcgatggttcctggctcttcgatcgaagataaatggggctggttagatcaagttaatcaagggggatcctacggtcattcagc

SEQ ID NO: 1634 - DNA, 158 bp, synthetic construct
  misc_feature 1..158: note = Synthetic nucleic acid
  source 1..158: mol_type = other DNA
cagacgacggccagtgtcgacatgacgcaatttgcatttgtgttccctggacagggttctcaaaccgttaacacttcttgcggcgatggttcctggctcttcgatccttcagcgatggcagcggcgctcgagcttgacggatcctacggtcattcagc

SEQ ID NO: 1635 - DNA, 158 bp, synthetic construct
  misc_feature 1..158: note = Synthetic nucleic acid
  source 1..158: mol_type = other DNA
cagacgacggccagtgtcgacatgagtattcgcataatcccgcaagatgagctgggttcaagcaacacttcttgcggcgatggttcctggctcttcgatcccatcaacccgttcctgtttccgggtgaaggagagcacggatcctacggtcattcagc

SEQ ID NO: 1636 - DNA, 158 bp, synthetic construct
  misc_feature 1..158: note = Synthetic nucleic acid
  source 1..158: mol_type = other DNA
cagacgacggccagtgtcgacatgcaaaaacagcataacgtcgtagcgggcgtggatataacacttcttgcggcgatggttcctggctcttcgatccatcaacgttttttgccacagttctgtgctaaagccccatctggatcctacggtcattcagc

SEQ ID NO: 1637 - DNA, 158 bp, synthetic construct
  misc_feature 1..158: note = Synthetic nucleic acid
  source 1..158: mol_type = other DNA
cagacgacggccagtgtcgacatgcaaaacgcaggcagcctcgttgttcttggcagcattaataacacttcttgcggcgatggttcctggctcttcgatcgtgaagagatcgacgcatttttagacaggcagaggctaggatcctacggtcattcagc

SEQ ID NO: 1638 - DNA, 158 bp, synthetic construct
  misc_feature 1..158: note = Synthetic nucleic acid
  source 1..158: mol_type = other DNA
cagacgacggccagtgtcgacatgcagttacagaaattagtcaatatgtttggtggtgatctcacccgtcgttataacacttcttgcggcgatggttcctggctcttcgatcgtccgtggctacctccaacggagaagggatcctacggtcattcagc

SEQ ID NO: 1639 - DNA, 158 bp, synthetic construct
  misc_feature 1..158: note = Synthetic nucleic acid
  source 1..158: mol_type = other DNA
cagacgacggccagtgtcgacatgccgattcgtgtgccggacgagctacccgcaacacttcttgcggcgatggttcctggctcttcgatccagatcacgccatacgatctacggcacatgaatccaacgctggatttgggatcctacggtcattcagc

SEQ ID NO: 1640 - DNA, 158 bp, synthetic construct
  misc_feature 1..158: note = Synthetic nucleic acid
  source 1..158: mol_type = other DNA
cagacgacggccagtgtcgacatggaacgactaaaacgcatgtcggtgtttgccaaagtagttgaatttgaacacttcttgcggcgatggttcctggctcttcgatcggagatgcacgggcgcgggaaagagaagacgggatcctacggtcattcagc

SEQ ID NO: 1641 - DNA, 158 bp, synthetic construct
  misc_feature 1..158: note = Synthetic nucleic acid
  source 1..158: mol_type = other DNA
cagacgacggccagtgtcgacatggcgcgttacgatctcgtagaccgactcaacactacaacacttcttgcggcgatggttcctggctcttcgatccgtttgatcattccacggctgcacctgtatgttgcagatgtcggatcctacggtcattcagc

SEQ ID NO: 1642 - DNA, 158 bp, synthetic construct
  misc_feature 1..158: note = Synthetic nucleic acid
  source 1..158: mol_type = other DNA
cagacgacggccagtgtcgacatggtacgtatctatacgttgacacttgcgccctctctaacacttcttgcggcgatggttcctggctcttcgatccatgacgatacgcaaaaaatttacgcttacctttcccgcatgggatcctacggtcattcagc

SEQ ID NO: 1643 - DNA, 158 bp, synthetic construct
  misc_feature 1..158: note = Synthetic nucleic acid
  source 1..158: mol_type = other DNA
cagacgacggccagtgtcgacatgtccaaaaagattgccgtgattggcgaatgcatgattgagctttccaacacttcttgcggcgatggttcctggctcttcgatccgattatcccgcgtgaggcgatgccagcgctaggatcctacggtcattcagc

SEQ ID NO: 1644 - DNA, 158 bp, synthetic construct
  misc_feature 1..158: note = Synthetic nucleic acid
  source 1..158: mol_type = other DNA
cagacgacggccagtgtcgacgtgacccaagaagaacgctttgagcaacggatagcccaggaaaaacacttcttgcggcgatggttcctggctcttcgatcccatgcacaaaaacaacatgcccgtaaggtcgcactcggatcctacggtcattcagc

SEQ ID NO: 1645 - DNA, 158 bp, synthetic construct
  misc_feature 1..158: note = Synthetic nucleic acid
  source 1..158: mol_type = other DNA
cagacgacggccagtgtcgacatgaaaataatacttctgtttttagcagccctggcaagttttaccgtacaaacacttcttgcggcgatggttcctggctcttcgatcgcaaaaactgccgccagattaaagcaagatggatcctacggtcattcagc

SEQ ID NO: 1646 - DNA, 158 bp, synthetic construct
  misc_feature 1..158: note = Synthetic nucleic acid
  source 1..158: mol_type = other DNA
cagacgacggccagtgtcgacatgaagaatcaagcgcatccgattattgtcgtcaaacgacgcaaaaacacttcttgcggcgatggttcctggctcttcgatcgtgttcccacaatgccatcagccgaaccgaggcggggatcctacggtcattcagc

SEQ ID NO: 1647 - DNA, 158 bp, synthetic construct
  misc_feature 1..158: note = Synthetic nucleic acid
  source 1..158: mol_type = other DNA
cagacgacggccagtgtcgacatgaccattgcactggaacttcaacagcttaaaaaaacctatccagaacacttcttgcggcgatggttcctggctcttcgatcactggttaatgaaaaacaaggagatcgcgcaagcggatcctacggtcattcagc

SEQ ID NO: 1648 - DNA, 158 bp, synthetic construct
  misc_feature 1..158: note = Synthetic nucleic acid
  source 1..158: mol_type = other DNA
cagacgacggccagtgtcgacatgactgaacaacaaattagccgaactcaggcgtggctaacacttcttgcggcgatggttcctggctcttcgatcctgtttgttttagggatattcctaagccagtgggcagcaatcggatcctacggtcattcagc

SEQ ID NO: 1649 - DNA, 158 bp, synthetic construct
  misc_feature 1..158: note = Synthetic nucleic acid
  source 1..158: mol_type = other DNA
cagacgacggccagtgtcgacatgattgaatttagccatgtcagcaaactgttcggcgcacaaaaagaacacttcttgcggcgatggttcctggctcttcgatcgctgcattttcaggatctgctggtggaggcgtttggatcctacggtcattcagc

SEQ ID NO: 1650 - DNA, 158 bp, synthetic construct
  misc_feature 1..158: note = Synthetic nucleic acid
  source 1..158: mol_type = other DNA
cagacgacggccagtgtcgacatgctcccgccttattttttgttcaaagagatgacagacacaaacacttcttgcggcgatggttcctggctcttcgatccaattgtaaattcaacattctcaaatgcgtcatgcgtaggatcctacggtcattcagc

SEQ ID NO: 1651 - DNA, 158 bp, synthetic construct
  misc_feature 1..158: note = Synthetic nucleic acid
  source 1..158: mol_type = other DNA
cagacgacggccagtgtcgacatgtccgcccagaaaccggggttgcatccgcgcaaccgtaacacttcttgcggcgatggttcctggctcttcgatcacgacgagcagcgccgccgttttgtcaatcgccagcgttgtggatcctacggtcattcagc

SEQ ID NO: 1652 - DNA, 158 bp, synthetic construct
  misc_feature 1..158: note = Synthetic nucleic acid
  source 1..158: mol_type = other DNA
cagacgacggccagtgtcgacatgtctgagcagtttttgtatttcttgcagcagatgtttaacggcaacacttcttgcggcgatggttcctggctcttcgatcgtattctgggtcgcccggaggtagagaaagtagcaggatcctacggtcattcagc

SEQ ID NO: 1653 - DNA, 158 bp, synthetic construct
  misc_feature 1..158: note = Synthetic nucleic acid
  source 1..158: mol_type = other DNA
cagacgacggccagtgtcgacatgttcgatccagaaaccttgcggactttcattgcggttaacacttcttgcggcgatggttcctggctcttcgatctcagcggatttttagaaattttcggcaacccacgcagtactggatcctacggtcattcagc

SEQ ID NO: 1654 - DNA, 158 bp, synthetic construct
  misc_feature 1..158: note = Synthetic nucleic acid
  source 1..158: mol_type = other DNA
cagacgacggccagtgtcgacgtggcagtcgccatggataatgcaattttagaaaacatcttgcaacacttcttgcggcgatggttcctggctcttcgatcacaattgacgaaacagttagggcgttcggtttatggatcctacggtcattcagccgc

SEQ ID NO: 1655 - DNA, 158 bp, synthetic construct
  misc_feature 1..158: note = Synthetic nucleic acid
  source 1..158: mol_type = other DNA
cagacgacggccagtgtcgacgtgtctgacacgttattaacgttacgcgacgtccatatcaatttcccggcccgtaaaaaaacacttcttgcggcgatggttcctggctcttcgatccggtgctggcgggcgctgaaaggatcctacggtcattcagc

SEQ ID NO: 1656 - DNA, 158 bp, synthetic construct
  misc_feature 1..158: note = Synthetic nucleic acid
  source 1..158: mol_type = other DNA
cagacgacggccagtgtcgacatgaataatttaccgctgctgaatgatttgcgcgtctttatgctaacacttcttgcggcgatggttcctggctcttcgatcgagcactacccgaatttttcactggagcatgcccggggatcctacggtcattcagc

SEQ ID NO: 1657 - DNA, 158 bp, synthetic construct
  misc_feature 1..158: note = Synthetic nucleic acid
  source 1..158: mol_type = other DNA
cagacgacggccagtgtcgacatgagtgttttatatccgttaattcaggcgctggtgttatttgccgttaacacttcttgcggcgatggttcctggctcttcgatcttttagcgttcgtctccttgctggcggcggtcggatcctacggtcattcagc

SEQ ID NO: 1658 - DNA, 158 bp, synthetic construct
  misc_feature 1..158: note = Synthetic nucleic acid
  source 1..158: mol_type = other DNA
cagacgacggccagtgtcgacatggaaaaaaatagtctgtttagtcagcgcatccgtttgcgaacacttcttgcggcgatggttcctggctcttcgatcttgatgattaacgctattcgaaaatcaatgccgttcaggggatcctacggtcattcagc

SEQ ID NO: 1659 - DNA, 158 bp, synthetic construct
  misc_feature 1..158: note = Synthetic nucleic acid
  source 1..158: mol_type = other DNA
cagacgacggccagtgtcgacatgggttccaccagaaaggggatgctgaacgttctgattgccaacacttcttgcggcgatggttcctggctcttcgatcgcgccagaaaaataaatcgtccggcgcggcataagtcaggatcctacggtcattcagc

SEQ ID NO: 1660 - DNA, 158 bp, synthetic construct
  misc_feature 1..158: note = Synthetic nucleic acid
  source 1..158: mol_type = other DNA
cagacgacggccagtgtcgacgtgaaaaaattacgtatcggcgtagtgggattaggtggcattgcaacacttcttgcggcgatggttcctggctcttcgatcgttgacaagatctggcgcgatgcgatgagtgaatatggatcctacggtcattcagc

SEQ ID NO: 1661 - DNA, 158 bp, synthetic construct
  misc_feature 1..158: note = Synthetic nucleic acid
  source 1..158: mol_type = other DNA
cagacgacggccagtgtcgacatgaaaatgaataaaagtctcatcgtcctctgtttatcagcagggttactggaacacttcttgcggcgatggttcctggctcttcgatctatcagcagtgtaaaaggcaaggggagaggatcctacggtcattcagc

SEQ ID NO: 1662 - DNA, 158 bp, synthetic construct
  misc_feature 1..158: note = Synthetic nucleic acid
  source 1..158: mol_type = other DNA
cagacgacggccagtgtcgacatgaatatgaaattgaaaacattattcgcagcggccttcgctgttgtcgaacacttcttgcggcgatggttcctggctcttcgatcccgctccgggatgccggttcgtctgaatgcgggatcctacggtcattcagc

SEQ ID NO: 1663 - DNA, 158 bp, synthetic construct
  misc_feature 1..158: note = Synthetic nucleic acid
  source 1..158: mol_type = other DNA
cagacgacggccagtgtcgacatgacgaatctacccaagttctccaccgcactgcttcatccaacacttcttgcggcgatggttcctggctcttcgatctttaaaacacgcccggaaggcgttccttcacgctatccgggatcctacggtcattcagc

SEQ ID NO: 1664 - DNA, 158 bp, synthetic construct
  misc_feature 1..158: note = Synthetic nucleic acid
  source 1..158: mol_type = other DNA
cagacgacggccagtgtcgacatgactgataaaatcgcggtcctgttgggtgggacctcaacacttcttgcggcgatggttcctggctcttcgatcttctcgcagttggtagtacgaattctggaactggcggacgaaggatcctacggtcattcagc

SEQ ID NO: 1665 - DNA, 158 bp, synthetic construct
  misc_feature 1..158: note = Synthetic nucleic acid
  source 1..158: mol_type = other DNA
cagacgacggccagtgtcgacatgagcaccttaggtcatcaatacgataactcactggtttccaatgaacacttcttgcggcgatggttcctggctcttcgatcgctgtatattcaggcggcgaaaaagggcgagccgggatcctacggtcattcagc

SEQ ID NO: 1666 - DNA, 158 bp, synthetic construct
  misc_feature 1..158: note = Synthetic nucleic acid
  source 1..158: mol_type = other DNA
cagacgacggccagtgtcgacatgcgtttccgccagttgttaccgctttttggcgcgaacacttcttgcggcgatggttcctggctcttcgatcaacccgtagttgcgccagttattcaggacgcatcaagcgagttcggatcctacggtcattcagc

SEQ ID NO: 1667 - DNA, 158 bp, synthetic construct
  misc_feature 1..158: note = Synthetic nucleic acid
  source 1..158: mol_type = other DNA
cagacgacggccagtgtcgacatgcttaattacgttatcaaacgcttactggggttgattccgacgctaacacttcttgcggcgatggttcctggctcttcgatcgccgccattaacccggctatcaggtacaagcgaggatcctacggtcattcagc

SEQ ID NO: 1668 - DNA, 158 bp, synthetic construct
  misc_feature 1..158: note = Synthetic nucleic acid
  source 1..158: mol_type = other DNA
cagacgacggccagtgtcgacatggaattaaaggattattacgccatcatgggcgtgaaaccgaaacacttcttgcggcgatggttcctggctcttcgatcgtcttttgatccacgtaaagattgggggaaagcagtaggatcctacggtcattcagc

SEQ ID NO: 1669 - DNA, 158 bp, synthetic construct
  misc_feature 1..158: note = Synthetic nucleic acid
  source 1..158: mol_type = other DNA
cagacgacggccagtgtcgacatgttaaaatttattctacgtcgctgtctggaagcgattccgacaacacttcttgcggcgatggttcctggctcttcgatcctatatgcggttatcgacccgaaaatccgttacttaggatcctacggtcattcagc

SEQ ID NO: 1670 - DNA, 158 bp, synthetic construct
  misc_feature 1..158: note = Synthetic nucleic acid
  source 1..158: mol_type = other DNA
cagacgacggccagtgtcgacatgtttccacaatgcaaattttcccgcgagtttctacatcctcgctaaacacttcttgcggcgatggttcctggctcttcgatccgcccggtgggagaatcgtcgttgtacattcatggatcctacggtcattcagc

SEQ ID NO: 1671 - DNA, 158 bp, synthetic construct
  misc_feature 1..158: note = Synthetic nucleic acid
  source 1..158: mol_type = other DNA
cagacgacggccagtgtcgacatgaacttcagacgcctgaaatacttcgtaaaaattgtagatattggtagcctaacacttcttgcggcgatggttcctggctcttcgatcaaaaggcagtggcaattggtgagctctggatcctacggtcattcagc

SEQ ID NO: 1672 - DNA, 158 bp, synthetic construct
  misc_feature 1..158: note = Synthetic nucleic acid
  source 1..158: mol_type = other DNA
cagacgacggccagtgtcgacatgaatattcgtgatcttgagtacctggtggcattggctgaaaacacttcttgcggcgatggttcctggctcttcgatcatggccatttcgataaagttttaaaacaggcggttccgggatcctacggtcattcagc

SEQ ID NO: 1673 - DNA, 158 bp, synthetic construct
  misc_feature 1..158: note = Synthetic nucleic acid
  source 1..158: mol_type = other DNA
cagacgacggccagtgtcgacatgacctggcttccccttaatcccattccactcaaagatcgcaacacttcttgcggcgatggttcctggctcttcgatcctgtttcactgggagatgcaggccatcggagtagctttggatcctacggtcattcagc

SEQ ID NO: 1674 - DNA, 158 bp, synthetic construct
  misc_feature 1..158: note = Synthetic nucleic acid
  source 1..158: mol_type = other DNA
cagacgacggccagtgtcgacatgatcaaacaaaggacacttaaacgtatcgttcaggcgacgggtgtaacacttcttgcggcgatggttcctggctcttcgatcgccttcaaagcgccttcagctgtactggcaagaggatcctacggtcattcagc

SEQ ID NO: 1675 - DNA, 158 bp, synthetic construct
  misc_feature 1..158: note = Synthetic nucleic acid
  source 1..158: mol_type = other DNA
cagacgacggccagtgtcgacatgccactcttaaagctctgggcaggttcactggttatgttaacacttcttgcggcgatggttcctggctcttcgatcgctgccgactacctgaaacaaaaagggtggacgaagcggggatcctacggtcattcagc

SEQ ID NO: 1676 - DNA, 158 bp, synthetic construct
  misc_feature 1..158: note = Synthetic nucleic acid
  source 1..158: mol_type = other DNA
cagacgacggccagtgtcgacatgcttatctttatcccgattctcatttttgtcgcgctggtcattgtaacacttcttgcggcgatggttcctggctcttcgatcaaagacagcgccaacaaacggactcagccatcaggatcctacggtcattcagc

SEQ ID NO: 1677 - DNA, 158 bp, synthetic construct
  misc_feature 1..158: note = Synthetic nucleic acid
  source 1..158: mol_type = other DNA
cagacgacggccagtgtcgacatgcttttggccgggagtagtttactgacgttgctcgatgatataacacttcttgcggcgatggttcctggctcttcgatcaaagccgtagagaaaatgcgcggtcaggcacatctgggatcctacggtcattcagc

SEQ ID NO: 1678 - DNA, 158 bp, synthetic construct
  misc_feature 1..158: note = Synthetic nucleic acid
  source 1..158: mol_type = other DNA
cagacgacggccagtgtcgacatggaattaatttttttaggtacttcagccggtgtgccaacccaacacttcttgcggcgatggttcctggctcttcgatctgaactggcgaatgatttcaccgtgtttaacgttagtggatcctacggtcattcagc

SEQ ID NO: 1679 - DNA, 158 bp, synthetic construct
  misc_feature 1..158: note = Synthetic nucleic acid
  source 1..158: mol_type = other DNA
cagacgacggccagtgtcgacatgtctaaacgattaccaccgctaaatgccttacgagtttttgatgcaacacttcttgcggcgatggttcctggctcttcgatccaagaaaaattccgctttcgttatgaacaattgggatcctacggtcattcagc

SEQ ID NO: 1680 - DNA, 158 bp, synthetic construct
  misc_feature 1..158: note = Synthetic nucleic acid
  source 1..158: mol_type = other DNA
cagacgacggccagtgtcgacatgaaagccacgtcggaagaactcgccatttttgtttcggtaacacttcttgcggcgatggttcctggctcttcgatcgtaaaaacagctcccggaggagctgtcagagaggctgttggatcctacggtcattcagc

SEQ ID NO: 1681 - DNA, 158 bp, synthetic construct
  misc_feature 1..158: note = Synthetic nucleic acid
  source 1..158: mol_type = other DNA
cagacgacggccagtgtcgacatgagctggattgaacgaattaaaagcaacattactcccacccgcaaggaacacttcttgcggcgatggttcctggctcttcgatccccggtaccggatcaggaacctgaggccgttggatcctacggtcattcagc

SEQ ID NO: 1682 - DNA, 158 bp, synthetic construct
  misc_feature 1..158: note = Synthetic nucleic acid
  source 1..158: mol_type = other DNA
cagacgacggccagtgtcgacatgagtcgttcacaaaatttacgccacaatgtgattaaccaggtaacacttcttgcggcgatggttcctggctcttcgatccgatccattaatgagaacacgcgttatgctcatcacggatcctacggtcattcagc

SEQ ID NO: 1683 - DNA, 158 bp, synthetic construct
  misc_feature 1..158: note = Synthetic nucleic acid
  source 1..158: mol_type = other DNA
cagacgacggccagtgtcgacatgattgttcgtccacaacaacactggctgcgccaacacttcttgcggcgatggttcctggctcttcgatcaattccagcaaaaattcttcccgatcgtcattaccagctgacgggaggatcctacggtcattcagc

SEQ ID NO: 1684 - DNA, 158 bp, synthetic construct
  misc_feature 1..158: note = Synthetic nucleic acid
  source 1..158: mol_type = other DNA
cagacgacggccagtgtcgacatgcgtttacctatcttcctcgatactgaccccggcattgacgatgccgtaacacttcttgcggcgatggttcctggctcttcgatcgtggctgaggtgctggctctggcgtcgatcggatcctacggtcattcagc

SEQ ID NO: 1685 - DNA, 158 bp, synthetic construct
  misc_feature 1..158: note = Synthetic nucleic acid
  source 1..158: mol_type = other DNA
cagacgacggccagtgtcgacatgtctctgtttcacttaattgccccatcgggttactgcattaaaaacacttcttgcggcgatggttcctggctcttcgatctgacgattagcggtcatcctgttcttaaaatgcctggatcctacggtcattcagc

SEQ ID NO: 1686 - DNA, 158 bp, synthetic construct
  misc_feature 1..158: note = Synthetic nucleic acid
  source 1..158: mol_type = other DNA
cagacgacggccagtgtcgacatgaaaattaccgtattgggatgcggtgccttagggcaattatggcttacaaacacttcttgcggcgatggttcctggctcttcgatctcggcactggtttgcctcgcccctggtacggatcctacggtcattcagc

SEQ ID NO: 1687 - DNA, 158 bp, synthetic construct
  misc_feature 1..158: note = Synthetic nucleic acid
  source 1..158: mol_type = other DNA
cagacgacggccagtgtcgacatgatgagcgaaagtaataagcaacaggcagtgaataagttgacagaaacacttcttgcggcgatggttcctggctcttcgatcgaaaatctgtctcacacccggagcgcgttattgggatcctacggtcattcagc

SEQ ID NO: 1688 - DNA, 158 bp, synthetic construct
  misc_feature 1..158: note = Synthetic nucleic acid
  source 1..158: mol_type = other DNA
cagacgacggccagtgtcgacatgcaaaagtttgataccaggaccttccagggcttgatcctaacacttcttgcggcgatggttcctggctcttcgatcgaagccctcggcttcccgatgtgcaacaaagataagtctggatcctacggtcattcagc

SEQ ID NO: 1689 - DNA, 158 bp, synthetic construct
  misc_feature 1..158: note = Synthetic nucleic acid
  source 1..158: mol_type = other DNA
cagacgacggccagtgtcgacatgctgtggttcaaaaatttaatggtttaccgtcttagccgcgaaacacttcttgcggcgatggttcctggctcttcgatcctgattgaaggattaggtggcgaagcacaacgtgtgggatcctacggtcattcagc

SEQ ID NO: 1690 - DNA, 158 bp, synthetic construct
  misc_feature 1..158: note = Synthetic nucleic acid
  source 1..158: mol_type = other DNA
cagacgacggccagtgtcgacatggatgactgtggtgcgattttgcataatattgaaaccaaatggctttataacacttcttgcggcgatggttcctggctcttcgatctgcgcgagctggagattgtgcttagcttcggatcctacggtcattcagc

SEQ ID NO: 1691 - DNA, 158 bp, synthetic construct
  misc_feature 1..158: note = Synthetic nucleic acid
  source 1..158: mol_type = other DNA
cagacgacggccagtgtcgacatgtatcaacgctgttttgataacgccagtgaaacgctaacacttcttgcggcgatggttcctggctcttcgatcatcctatctgaatttcctcaaccggtaagtcttgttggaagaggatcctacggtcattcagc

SEQ ID NO: 1692 - DNA, 158 bp, synthetic construct
  misc_feature 1..158: note = Synthetic nucleic acid
  source 1..158: mol_type = other DNA
cagacgacggccagtgtcgacatgtattacgggtttgatattggtggaacaaaaattgcgcttggcgtaacacttcttgcggcgatggttcctggctcttcgatccgtggtgcggccttcctacatctaaccgatagtggatcctacggtcattcagc

SEQ ID NO: 1693 - DNA, 158 bp, synthetic construct
  misc_feature 1..158: note = Synthetic nucleic acid
  source 1..158: mol_type = other DNA
cagacgacggccagtgtcgacgtgagtacattagaacaaacaataggcaatacgcctctggtgaagttgaacacttcttgcggcgatggttcctggctcttcgatcaagagcattttagccagggggcggggattactggatcctacggtcattcagc

SEQ ID NO: 1694 - DNA, 158 bp, synthetic construct
  misc_feature 1..158: note = Synthetic nucleic acid
  source 1..158: mol_type = other DNA
cagacgacggccagtgtcgacatgaaaacgggatctgagtttcatgtcggtatcgttggcttaaacacttcttgcggcgatggttcctggctcttcgatcttttctctggcatcactctaccgggagcgaaatcacgaggatcctacggtcattcagc

SEQ ID NO: 1695 - DNA, 158 bp, synthetic construct
  misc_feature 1..158: note = Synthetic nucleic acid
  source 1..158: mol_type = other DNA
cagacgacggccagtgtcgacatgaatacagatacgtttatgtgcagcagcgacgaaaaacagacccgcagcaacacttcttgcggcgatggttcctggctcttcgatcaacagcgccgccagacgtttcccggcggtggatcctacggtcattcagc

SEQ ID NO: 1696 - DNA, 158 bp, synthetic construct
  misc_feature 1..158: note = Synthetic nucleic acid
  source 1..158: mol_type = other DNA
cagacgacggccagtgtcgacatgatgttaagtaagaaaaacagcgagacgctggaaaatttcagtgaaaagctaacacttcttgcggcgatggttcctggctcttcgatcgatgccctcgacccgaaagatcgtgtcggatcctacggtcattcagc

SEQ ID NO: 1697 - DNA, 158 bp, synthetic construct
  misc_feature 1..158: note = Synthetic nucleic acid
  source 1..158: mol_type = other DNA
cagacgacggccagtgtcgacatgatttccgcttcgctgcaacaacgtaaaactcgcacccgaacacttcttgcggcgatggttcctggctcttcgatcctctcccgtgcagaactttccggcatccgcgaagaatacggatcctacggtcattcagc

SEQ ID NO: 1698 - DNA, 158 bp, synthetic construct
  misc_feature 1..158: note = Synthetic nucleic acid
  source 1..158: mol_type = other DNA
cagacgacggccagtgtcgacatgcaattacgtaaacctgccacagcaatcctcgccaacacttcttgcggcgatggttcctggctcttcgatctgaaagcactgttcaaagaaccgaatgacaaggcactgaacgggggatcctacggtcattcagc

SEQ ID NO: 1699 - DNA, 158 bp, synthetic construct
  misc_feature 1..158: note = Synthetic nucleic acid
  source 1..158: mol_type = other DNA
cagacgacggccagtgtcgacatgccgcagtccgcgttgttcacgggaatcattccccctaacacttcttgcggcgatggttcctggctcttcgatccgcagctgaaaaccctgctgcaacagctcaagctttgccaaggatcctacggtcattcagc

SEQ ID NO: 1700 - DNA, 158 bp, synthetic construct
  misc_feature 1..158: note = Synthetic nucleic acid
  source 1..158: mol_type = other DNA
cagacgacggccagtgtcgacatgcgcaatcgtacgctggctgatcttgatcgtgtaacacttcttgcggcgatggttcctggctcttcgatcttgttacataacgcgctggaaaaggcgttacaggctttaggttcgggatcctacggtcattcagc

SEQ ID NO: 1701 - DNA, 158 bp, synthetic construct
  misc_feature 1..158: note = Synthetic nucleic acid
  source 1..158: mol_type = other DNA
cagacgacggccagtgtcgacatgcggatgaatatgtctgactttgccactttctttgccgtggcaacacttcttgcggcgatggttcctggctcttcgatccagatctgccagagtcagcgtcaccgaccacaacacggatcctacggtcattcagc

SEQ ID NO: 1702 - DNA, 158 bp, synthetic construct
  misc_feature 1..158: note = Synthetic nucleic acid
  source 1..158: mol_type = other DNA
cagacgacggccagtgtcgacatggatcaaatacgacttactcacctgcggcaactggagaacacttcttgcggcgatggttcctggctcttcgatccggggtctatggagctgaaaaaacgtcaggggtattttatgggatcctacggtcattcagc

SEQ ID NO: 1703 - DNA, 158 bp, synthetic construct
  misc_feature 1..158: note = Synthetic nucleic acid
  source 1..158: mol_type = other DNA
cagacgacggccagtgtcgacatggctgccattaatacgaaagtcaaaaaagccgttatccccaacacttcttgcggcgatggttcctggctcttcgatcaagcctggcttgaagaagagatgggcattaagaagtccggatcctacggtcattcagc

SEQ ID NO: 1704 - DNA, 158 bp, synthetic construct
  misc_feature 1..158: note = Synthetic nucleic acid
  source 1..158: mol_type = other DNA
cagacgacggccagtgtcgacatggcttttcaggtaaaaattcatcaaattcgggcttttgttgaagtggaacacttcttgcggcgatggttcctggctcttcgatcccggcgagaatgcggctatctgcaaagtccaggatcctacggtcattcagc

SEQ ID NO: 1705 - DNA, 158 bp, synthetic construct
  misc_feature 1..158: note = Synthetic nucleic acid
  source 1..158: mol_type = other DNA
cagacgacggccagtgtcgacgtgcgtataggtatcgatttaggcggcaccaaaactgaagtgattgcactaacacttcttgcggcgatggttcctggctcttcgatcggcgctgcgtggttatggccacaagagtggggatcctacggtcattcagc

SEQ ID NO: 1706 - DNA, 158 bp, synthetic construct
  misc_feature 1..158: note = Synthetic nucleic acid
  source 1..158: mol_type = other DNA
cagacgacggccagtgtcgacatgaaaaaattcagcggcattattccaccggtatccagcacgtttaacacttcttgcggcgatggttcctggctcttcgatctgctgcttaccgcgcagggcattttaccagtcaggggatcctacggtcattcagc

SEQ ID NO: 1707 - DNA, 158 bp, synthetic construct
  misc_feature 1..158: note = Synthetic nucleic acid
  source 1..158: mol_type = other DNA
cagacgacggccagtgtcgacatgaaaaagttattaccctgtaccgcactggtgatgtgtgcaacacttcttgcggcgatggttcctggctcttcgatcttccattatgcaggtgtcggcgtaaattactcgttccttggatcctacggtcattcagc

SEQ ID NO: 1708 - DNA, 158 bp, synthetic construct
  misc_feature 1..158: note = Synthetic nucleic acid
  source 1..158: mol_type = other DNA
cagacgacggccagtgtcgacatgaaccccgcagtggataatgagtttcagcaatggctttcccaaataacacttcttgcggcgatggttcctggctcttcgatcacgccaggcgagtatcgacgtaaattccgccacggatcctacggtcattcagc

SEQ ID NO: 1709 - DNA, 158 bp, synthetic construct
  misc_feature 1..158: note = Synthetic nucleic acid
  source 1..158: mol_type = other DNA
cagacgacggccagtgtcgacatgagaaagataaaaatagggctggcgctgggatctggcgaacacttcttgcggcgatggttcctggctcttcgatcaatggacgaacttttgccgttggtacgcaccaacattttcggatcctacggtcattcagc

SEQ ID NO: 1710 - DNA, 158 bp, synthetic construct
  misc_feature 1..158: note = Synthetic nucleic acid
  source 1..158: mol_type = other DNA
cagacgacggccagtgtcgacatgagcatcgataaaagttactgcggatttattgccatcgtcggaaacacttcttgcggcgatggttcctggctcttcgatccactgcgcagtctcggttacgttgacgatcttaatggatcctacggtcattcagc

SEQ ID NO: 1711 - DNA, 158 bp, synthetic construct
  misc_feature 1..158: note = Synthetic nucleic acid
  source 1..158: mol_type = other DNA
cagacgacggccagtgtcgacatgcgtcgaacgtttatcaaaaaagaaggcgtcgtcatcacaacacttcttgcggcgatggttcctggctcttcgatccaacgggtagtgagtggggaacaggaaccgagttataccggatcctacggtcattcagc

SEQ ID NO: 1712 - DNA, 158 bp, synthetic construct
  misc_feature 1..158: note = Synthetic nucleic acid
  source 1..158: mol_type = other DNA
cagacgacggccagtgtcgacatgtctgccgcaggaaagagcaacccactggcaataacacttcttgcggcgatggttcctggctcttcgatcgtgagccgtaagaaaaaagaagccgtcagtgtaaaaaggatcgtcggatcctacggtcattcagc

SEQ ID NO: 1713 - DNA, 158 bp, synthetic construct
  misc_feature 1..158: note = Synthetic nucleic acid
  source 1..158: mol_type = other DNA
cagacgacggccagtgtcgacgtggatagcgcacgcgcccttattgcccggggataacacttcttgcggcgatggttcctggctcttcgatcgcgggcttgtaatgggttaagtgataacagatgtctggaaatacggggatcctacggtcattcagc

SEQ ID NO: 1714 - DNA, 158 bp, synthetic construct
  misc_feature 1..158: note = Synthetic nucleic acid
  source 1..158: mol_type = other DNA
cagacgacggccagtgtcgacgtggatagcgcacgcgcccttattgcccggggataacacttcttgcggcgatggttcctggctcttcgatcgcgggcttgtaatgggttaagtgataacagatgtctggaaataaagggatcctacggtcattcagc

SEQ ID NO: 1715 - DNA, 158 bp, synthetic construct
  misc_feature 1..158: note = Synthetic nucleic acid
  source 1..158: mol_type = other DNA
cagacgacggccagtgtcgacgtggatagcgcacgcgcccttattgcccggggataacacttcttgcggcgatggttcctggctcttcgatcgcgggcttgtaatgggttaagtgataacagatgtctggaaatatgtggatcctacggtcattcagc

SEQ ID NO: 1716 - DNA, 158 bp, synthetic construct
  misc_feature 1..158: note = Synthetic nucleic acid
  source 1..158: mol_type = other DNA
cagacgacggccagtgtcgacgtggatagcgcacgcgcccttattgcccggggataacacttcttgcggcgatggttcctggctcttcgatcgcgggcttgtaatgggttaagtgataacagatgtctggaaataacgggatcctacggtcattcagc

SEQ ID NO: 1717 - DNA, 158 bp, synthetic construct; identical to SEQ ID NO: 1715
  misc_feature 1..158: note = Synthetic nucleic acid
  source 1..158: mol_type = other DNA

SEQ ID NO: 1718 - DNA, 158 bp, synthetic construct
  misc_feature 1..158: note = Synthetic nucleic acid
  source 1..158: mol_type = other DNA
cagacgacggccagtgtcgacgtggatagcgcacgcgcccttattgcccggggataacacttcttgcggcgatggttcctggctcttcgatcgcgggcttgtaatgggttaagtgataacagatgtctggaaataggcggatcctacggtcattcagc

SEQ ID NO: 1719 - DNA, 158 bp, synthetic construct
  misc_feature 1..158: note = Synthetic nucleic acid
  source 1..158: mol_type = other DNA
cagacgacggccagtgtcgacatgaaacgagttattaccctgtttgctgtactgctgatgggaacacttcttgcggcgatggttcctggctcttcgatcgtgcaatcgattattggcgtgacttttgtttatcaagagggatcctacggtcattcagc

SEQ ID NO: 1720 - DNA, 158 bp, synthetic construct
  misc_feature 1..158: note = Synthetic nucleic acid
  source 1..158: mol_type = other DNA
cagacgacggccagtgtcgacatgaatcaatcttatggacggctggtcagtcgggcggcaacacttcttgcggcgatggttcctggctcttcgatctccgtcgtacccagggagggtaaacggtctatgctttcacggggatcctacggtcattcagc

SEQ ID NO: 1721 - DNA, 158 bp, synthetic construct
  misc_feature 1..158: note = Synthetic nucleic acid
  source 1..158: mol_type = other DNA
cagacgacggccagtgtcgacatggatgcaccgagtaccacaccgcatgacgcaacacttcttgcggcgatggttcctggctcttcgatcgcaaatttacctcttgctgagattgataaggtaattaaccttattagcggatcctacggtcattcagc

SEQ ID NO: 1722 - DNA, 158 bp, synthetic construct
  misc_feature 1..158: note = Synthetic nucleic acid
  source 1..158: mol_type = other DNA
cagacgacggccagtgtcgacatggcttatcaatctcaagatatcattcgtcgttccgcgactaaaacacttcttgcggcgatggttcctggctcttcgatcaatctgcacgaagagaaagacgaggagcgcaaaaccggatcctacggtcattcagc

SEQ ID NO: 1723 - DNA, 158 bp, synthetic construct
  misc_feature 1..158: note = Synthetic nucleic acid
  source 1..158: mol_type = other DNA
cagacgacggccagtgtcgacatgtcacaggttactgaaaataaagtgattagcgcaccggtgccgataacacttcttgcggcgatggttcctggctcttcgatccgtgacgcgctcgatcccaaactgaagcagcagggatcctacggtcattcagc

SEQ ID NO: 1724 - DNA, 158 bp, synthetic construct
  misc_feature 1..158: note = Synthetic nucleic acid
  source 1..158: mol_type = other DNA
cagacgacggccagtgtcgacatgttggcatttatccgttttctttttgcaggcctgctaacacttcttgcggcgatggttcctggctcttcgatcgtaaaaatcttccaccatcagccgcttaccgttgtgaaagagggatcctacggtcattcagc

SEQ ID NO: 1725 - DNA, 158 bp, synthetic construct
  misc_feature 1..158: note = Synthetic nucleic acid
  source 1..158: mol_type = other DNA
cagacgacggccagtgtcgacgtgaaaattgccatattgtcccgggatggaacgctctattcgtaacacttcttgcggcgatggttcctggctcttcgatccgctacgacagaatattgcctgaaaacgggtggtattggatcctacggtcattcagc

SEQ ID NO: 1726 - DNA, 158 bp, synthetic construct
  misc_feature 1..158: note = Synthetic nucleic acid
  source 1..158: mol_type = other DNA
cagacgacggccagtgtcgacatgaaacccgacgcacaccaggttaaacagtttctgctaacacttcttgcggcgatggttcctggctcttcgatcgcggcgttaagtgagtttattaaggtcagggattgggtgaccggatcctacggtcattcagc

SEQ ID NO: 1727 - DNA, 158 bp, synthetic construct
  misc_feature 1..158: note = Synthetic nucleic acid
  source 1..158: mol_type = other DNA
cagacgacggccagtgtcgacatgaagcgtgaagaaatcgctgatctgatggcgtttaacacttcttgcggcgatggttcctggctcttcgatctctcattatttatagataggctgaagtataaaggtgctgttggtggatcctacggtcattcagc

SEQ ID NO: 1728 - DNA, 158 bp, synthetic construct
  misc_feature 1..158: note = Synthetic nucleic acid
  source 1..158: mol_type = other DNA
cagacgacggccagtgtcgacatgaatatcctcctttttggcaaaacagggcaggtaggttaacacttcttgcggcgatggttcctggctcttcgatcacgaatgctcaatgaattatttacgactacagcaattcctggatcctacggtcattcagc

SEQ ID NO: 1729 - DNA, 158 bp, synthetic construct
  misc_feature 1..158: note = Synthetic nucleic acid
  source 1..158: mol_type = other DNA
cagacgacggccagtgtcgacatgacagacaacactcgtttacgcatagctatgcagaaatccaacacttcttgcggcgatggttcctggctcttcgatccaattctggtcctgccgattgagaagatgatggagaacggatcctacggtcattcagc

SEQ ID NO: 1730 - DNA, 158 bp, synthetic construct
  misc_feature 1..158: note = Synthetic nucleic acid
  source 1..158: mol_type = other DNA
cagacgacggccagtgtcgacatgaccgaatcaacaacctcctccccgcatgatgcaacacttcttgcggcgatggttcctggctcttcgatcgcgacaacccaactcactgatgctgatattccgaactgtcatgagggatcctacggtcattcagc

SEQ ID NO: 1731 - DNA, 158 bp, synthetic construct
  misc_feature 1..158: note = Synthetic nucleic acid
  source 1..158: mol_type = other DNA
cagacgacggccagtgtcgacatgattttcaatattcagcgctactcgacccatgatggccccgaacacttcttgcggcgatggttcctggctcttcgatcctgccagaaagggttaaccgcgaccttacgaggaggaggatcctacggtcattcagc

SEQ ID NO: 1732 - DNA, 158 bp, synthetic construct
  misc_feature 1..158: note = Synthetic nucleic acid
  source 1..158: mol_type = other DNA
cagacgacggccagtgtcgacatgctctctcgacatatcaattattttcttgccgtggctgaacatggcaaacacttcttgcggcgatggttcctggctcttcgatccgcggttgttggcggaaatgaatcacggtcaggatcctacggtcattcagc

SEQ ID NO: 1733 - DNA, 158 bp, synthetic construct
  misc_feature 1..158: note = Synthetic nucleic acid
  source 1..158: mol_type = other DNA
cagacgacggccagtgtcgacatggactttccgcagcaactcgaagcctgcgttaagaacacttcttgcggcgatggttcctggctcttcgatccactggaagcgctagcggactacatcatccagcgtaataaactcggatcctacggtcattcagc

SEQ ID NO: 1734 - DNA, 158 bp, synthetic construct
  misc_feature 1..158: note = Synthetic nucleic acid
  source 1..158: mol_type = other DNA
cagacgacggccagtgtcgacatggataaaattcacgcaatgcagttgttcatcaaagtcgcggaaacacttcttgcggcgatggttcctggctcttcgatctggctggctggcgtaatgaaagagtacctggactacggatcctacggtcattcagc

SEQ ID NO: 1735 - DNA, 158 bp, synthetic construct
  misc_feature 1..158: note = Synthetic nucleic acid
  source 1..158: mol_type = other DNA
cagacgacggccagtgtcgacatggcagaatttcccgccagcttactgattcttaatggcaaaaaacacttcttgcggcgatggttcctggctcttcgatcttgtcgattaccaccagattgtccactgttgcgtgatggatcctacggtcattcagc

SEQ ID NO: 1736 - DNA, 158 bp, synthetic construct
  misc_feature 1..158: note = Synthetic nucleic acid
  source 1..158: mol_type = other DNA
cagacgacggccagtgtcgacatgtcgcgaaaagatggggtgttggcgctactggtagtggtaacacttcttgcggcgatggttcctggctcttcgatcggcttgcggtggcgtaaagcggtaaaggtgggaagtacgggatcctacggtcattcagc

SEQ ID NO: 1737 - DNA, 158 bp, synthetic construct
  misc_feature 1..158: note = Synthetic nucleic acid
  source 1..158: mol_type = other DNA
cagacgacggccagtgtcgacatgtctcaggttcagagtggcattttgccagaacattgccgcgaacacttcttgcggcgatggttcctggctcttcgatctttcgcaccgtcgctggacaagttgatggcgctgtctggatcctacggtcattcagc

SEQ ID NO: 1738 - DNA, 158 bp, synthetic construct
  misc_feature 1..158: note = Synthetic nucleic acid
  source 1..158: mol_type = other DNA
cagacgacggccagtgtcgacatgttttctgggctgttaatcattctggttcccctgattgtggaacacttcttgcggcgatggttcctggctcttcgatcgttagtgccgatcctcatcgcctttttctctgcggacggatcctacggtcattcagc

SEQ ID NO: 1739 - DNA, 158 bp, synthetic construct
  misc_feature 1..158: note = Synthetic nucleic acid
  source 1..158: mol_type = other DNA
cagacgacggccagtgtcgacgtggcgctacttatcatcaccacgattctgtgggccttctcctttagcttttataacacttcttgcggcgatggttcctggctcttcgatcggcgtgattgcgcgctgagcgaaggatcctacggtcattcagccgc

SEQ ID NO: 1740 - DNA, 158 bp, synthetic construct
  misc_feature 1..158: note = Synthetic nucleic acid
  source 1..158: mol_type = other DNA
cagacgacggccagtgtcgacatgaccgatttacacaccgatgtagaacgctacctacgttatctgagcgtgaacacttcttgcggcgatggttcctggctcttcgatccgcatccacgcgccaaacgggggaaagctggatcctacggtcattcagc

SEQ ID NO: 1741 - DNA, 158 bp, synthetic construct
  misc_feature 1..158: note = Synthetic nucleic acid
  source 1..158: mol_type = other DNA
cagacgacggccagtgtcgacatgatgctaagcgaggaaacgtccgccgtacgcccaaacacttcttgcggcgatggttcctggctcttcgatcttcgcgatctgcttgacccgaaagcaggaggaaagcagtcatacggatcctacggtcattcagc

SEQ ID NO: 1742 - DNA, 158 bp, synthetic construct
  misc_feature 1..158: note = Synthetic nucleic acid
  source 1..158: mol_type = other DNA
cagacgacggccagtgtcgacatgattcgtgttgcttgtgtaggtataaccgtgatggatcgcataacacttcttgcggcgatggttcctggctcttcgatcgatcaaacccgatcttttttgtcactttttgtagatggatcctacggtcattcagc

SEQ ID NO: 1743 - DNA, 158 bp, synthetic construct
  misc_feature 1..158: note = Synthetic nucleic acid
  source 1..158: mol_type = other DNA
cagacgacggccagtgtcgacatgcaatttgaaaagatgattactgaaggctcgaacaccgcaacacttcttgcggcgatggttcctggctcttcgatccacggcggctttattcgtcaggttttagacaaggaaggcggatcctacggtcattcagc

SEQ ID NO: 1744 - DNA, 158 bp, synthetic construct
  misc_feature 1..158: note = Synthetic nucleic acid
  source 1..158: mol_type = other DNA
cagacgacggccagtgtcgacatggcagcaatcgcgtttatcggtttaggacaaatgggttaacacttcttgcggcgatggttcctggctcttcgatcccgtgtcagtgccgggatgactgccaaagtaaaaatgataggatcctacggtcattcagc

SEQ ID NO: 1745 - DNA, 158 bp, synthetic construct
  misc_feature 1..158: note = Synthetic nucleic acid
  source 1..158: mol_type = other DNA
cagacgacggccagtgtcgacatggccaaagaaagggcattaacgctggaagcactacaacacttcttgcggcgatggttcctggctcttcgatcctggtgtctgcgggaaattcccaaactttttaacggaaaaaccggatcctacggtcattcagc

SEQ ID NO: 1746 - DNA, 158 bp, synthetic construct
  misc_feature 1..158: note = Synthetic nucleic acid
  source 1..158: mol_type = other DNA
cagacgacggccagtgtcgacatggttcagcgtattactattgcgccgcaaggcccggaaacacttcttgcggcgatggttcctggctcttcgatctttcgtatccgtaaagcggcactggggtacgacgtaccggggggatcctacggtcattcagc

SEQ ID NO: 1747 - DNA, 158 bp, synthetic construct
  misc_feature 1..158: note = Synthetic nucleic acid
  source 1..158: mol_type = other DNA
cagacgacggccagtgtcgacgtgaaacaggatctggcacgcatcgagcagtttcttgatgctctgtaacacttcttgcggcgatggttcctggctcttcgatcgcaacttcatcaacagcatcacccgcgggcgtcgggatcctacggtcattcagc

SEQ ID NO: 1748 - DNA, 158 bp, synthetic construct
  misc_feature 1..158: note = Synthetic nucleic acid
  source 1..158: mol_type = other DNA
cagacgacggccagtgtcgacatgaaaacactggttgtggctcttgggggcaacgccttactccagaacacttcttgcggcgatggttcctggctcttcgatctggcgggcgaagcggggacctgtatttcgctgttaggatcctacggtcattcagc

SEQ ID NO: 1749 - DNA, 158 bp, synthetic construct
  misc_feature 1..158: note = Synthetic nucleic acid
  source 1..158: mol_type = other DNA
cagacgacggccagtgtcgacatgaaaccgcaggtgtaccacgtcgatgcttttacctaacacttcttgcggcgatggttcctggctcttcgatcagcggtgattttgtttcatgccgaatgggcaattgaactccatggatcctacggtcattcagc

SEQ ID NO: 1750 - DNA, 158 bp, synthetic construct
  misc_feature 1..158: note = Synthetic nucleic acid
  source 1..158: mol_type = other DNA
cagacgacggccagtgtcgacatgaaacgcccggactacagaacattacaggcactgaacacttcttgcggcgatggttcctggctcttcgatcatgcgttactcgattatggtcacaaagtccttcgtcaggatcccggatcctacggtcattcagc

SEQ ID NO: 1751 - DNA, 158 bp, synthetic construct
  misc_feature 1..158: note = Synthetic nucleic acid
  source 1..158: mol_type = other DNA
cagacgacggccagtgtcgacatgaacatagtgatcaccggagggacaggattaattggtcgccatttaacacttcttgcggcgatggttcctggctcttcgatcttagaagaggcgctggcggatgtcgttcgcaaaggatcctacggtcattcagc

SEQ ID NO: 1752 - DNA, 158 bp, synthetic construct
  misc_feature 1..158: note = Synthetic nucleic acid
  source 1..158: mol_type = other DNA
cagacgacggccagtgtcgacatgaagctcttagcaaaagcacctctaaatctgttacgcgcaacacttcttgcggcgatggttcctggctcttcgatctggctactgaatgaactcaatctgggtaaaattcgtagaggatcctacggtcattcagc

SEQ ID NO: 1753 - DNA, 158 bp, synthetic construct
  misc_feature 1..158: note = Synthetic nucleic acid
  source 1..158: mol_type = other DNA
cagacgacggccagtgtcgacatgaatattgaacttcgtcatctgcgttactttgttgctgttgcgaacacttcttgcggcgatggttcctggctcttcgatcactttcgtattcatctgctgaatgctctcaggctgggatcctacggtcattcagc

SEQ ID NO: 1754 - DNA, 158 bp, synthetic construct
  misc_feature 1..158: note = Synthetic nucleic acid
  source 1..158: mol_type = other DNA
cagacgacggccagtgtcgacatgacgaatttaaaagcagttattcctgtagcgggtctcggaacacttcttgcggcgatggttcctggctcttcgatcaagttccgtaaaggtattgagaagctgttaagcgaactaggatcctacggtcattcagc

SEQ ID NO: 1755 - DNA, 158 bp, synthetic construct
  misc_feature 1..158: note = Synthetic nucleic acid
  source 1..158: mol_type = other DNA
cagacgacggccagtgtcgacatgccgcctcgccgctataaccctgacacccgaaacacttcttgcggcgatggttcctggctcttcgatctaactaaacacgtacaagcactcgacctttcaatgcgttttcgctcgggatcctacggtcattcagc

SEQ ID NO: 1756 - DNA, 158 bp, synthetic construct
  misc_feature 1..158: note = Synthetic nucleic acid
  source 1..158: mol_type = other DNA
cagacgacggccagtgtcgacatggaacagctgcgtgccgaattaagccatttactgggcgaaaaaaacacttcttgcggcgatggttcctggctcttcgatctggcatcaaaatcactcttgccgtggctcgccggatcctacggtcattcagccgc

SEQ ID NO: 1757 - DNA, 158 bp, synthetic construct
  misc_feature 1..158: note = Synthetic nucleic acid
  source 1..158: mol_type = other DNA
cagacgacggccagtgtcgacatggcaacgaatttacgtggcgtaatggctgcactcctgactccttttaacacttcttgcggcgatggttcctggctcttcgatctggcccagcagttgatgcaagagcgcggggttggatcctacggtcattcagc

SEQ ID NO: 1758 - DNA, 158 bp, synthetic construct
  misc_feature 1..158: note = Synthetic nucleic acid
  source 1..158: mol_type = other DNA
cagacgacggccagtgtcgacgtggatttacgcgatctgaaaaccttcctgcatctggcaacacttcttgcggcgatggttcctggctcttcgatcctaattgaggcattctggaagattttgccgaaccacaaagacggatcctacggtcattcagc

SEQ ID NO: 1759 - DNA, 158 bp, synthetic construct
  misc_feature 1..158: note = Synthetic nucleic acid
  source 1..158: mol_type = other DNA
cagacgacggccagtgtcgacatgaacatgaaaaaactggctaccctggtttccgctgttaacacttcttgcggcgatggttcctggctcttcgatcctaagtatccggttgatctgaaactggttgttaagcagctcggatcctacggtcattcagc

SEQ ID NO: 1760 - DNA, 158 bp, synthetic construct
  misc_feature 1..158: note = Synthetic nucleic acid
  source 1..158: mol_type = other DNA
cagacgacggccagtgtcgacatgaccaaagtaggcttacgcattgatgtcgatacctttcgtggcaaacacttcttgcggcgatggttcctggctcttcgatcgctgggttgccaacaaattgcgggtagtcgcaatggatcctacggtcattcagc

SEQ ID NO: 1761 - DNA, 158 bp, synthetic construct
  misc_feature 1..158: note = Synthetic nucleic acid
  source 1..158: mol_type = other DNA
cagacgacggccagtgtcgacatgagccagtcagagtttgattcagcgcttccgaacggtataaacacttcttgcggcgatggttcctggctcttcgatccaattgttgatttcttctcaccaggcgcgctgaaagagggatcctacggtcattcagc

SEQ ID NO: 1762 - DNA, 158 bp, synthetic construct
  misc_feature 1..158: note = Synthetic nucleic acid
  source 1..158: mol_type = other DNA
cagacgacggccagtgtcgacatgagcttttttcacgccagccagcgggatgccctaacacttcttgcggcgatggttcctggctcttcgatcagttacgcgatttgccatacgctgggggttcgacctggtttattcggatcctacggtcattcagc

SEQ ID NO: 1763 - DNA, 158 bp, synthetic construct
  misc_feature 1..158: note = Synthetic nucleic acid
  source 1..158: mol_type = other DNA
cagacgacggccagtgtcgacatgatgtttaagcaatacctgcaagtaacgaaaccaggcatcatctttggcaaaacacttcttgcggcgatggttcctggctcttcgatccatacgctgctggctgctgtgtgggcaggatcctacggtcattcagc

SEQ ID NO: 1764 - DNA, 158 bp, synthetic construct
  misc_feature 1..158: note = Synthetic nucleic acid
  source 1..158: mol_type = other DNA
cagacgacggccagtgtcgacatgccttacgatagcgtatacagcgaaaagcgcccgccggaacacttcttgcggcgatggttcctggctcttcgatccgatggcgttcgtcgtgcgattattgcgggggtggaatgcggatcctacggtcattcagc

SEQ ID NO: 1765 - DNA, 158 bp, synthetic construct
  misc_feature 1..158: note = Synthetic nucleic acid
  source 1..158: mol_type = other DNA
cagacgacggccagtgtcgacatgcgtaagttcattttcgtattgctgacactgcttttggtcagccctttttaacacttcttgcggcgatggttcctggctcttcgatccgtcgcgcacggcattctcgagtattcgggatcctacggtcattcagc

SEQ ID NO: 1766 - DNA, 158 bp, synthetic construct
  misc_feature 1..158: note = Synthetic nucleic acid
  source 1..158: mol_type = other DNA
cagacgacggccagtgtcgacatggaactacggcatttacgctatttcgtcgcagtggcgcagaacacttcttgcggcgatggttcctggctcttcgatcccattgtgcaggaacgtttggcaagcgtaacggcagcgggatcctacggtcattcagc

SEQ ID NO: 1767 - DNA, 158 bp, synthetic construct
  misc_feature 1..158: note = Synthetic nucleic acid
  source 1..158: mol_type = other DNA
cagacgacggccagtgtcgacatggatgcaaaacaaacgcggcagggcgtattactaacacttcttgcggcgatggttcctggctcttcgatctttgtgatggatgcgatttatacgcagcgtagaacgtccaaatcgggatcctacggtcattcagc

SEQ ID NO: 1768 - DNA, 158 bp, synthetic construct
  misc_feature 1..158: note = Synthetic nucleic acid
  source 1..158: mol_type = other DNA
cagacgacggccagtgtcgacatggcaatggtccaaccgaaatcgcaaaaagctcgtttatttattactcaaacacttcttgcggcgatggttcctggctcttcgatcggcctgacggcaggtggtgtgaaaggtcgtggatcctacggtcattcagc

SEQ ID NO: 1769 - DNA, 158 bp, synthetic construct
  misc_feature 1..158: note = Synthetic nucleic acid
  source 1..158: mol_type = other DNA
cagacgacggccagtgtcgacatggctatggttgaaatgcaaaccactgcggcgctggaacacttcttgcggcgatggttcctggctcttcgatccattctggcgcgcgttgtttttgcgaagaataaacacggtagcggatcctacggtcattcagc

SEQ ID NO: 1770 - DNA, 158 bp, synthetic construct
  misc_feature 1..158: note = Synthetic nucleic acid
  source 1..158: mol_type = other DNA
cagacgacggccagtgtcgacatgtctctacactctccaggtaaagcgtttcgcgctgcactaacacttcttgcggcgatggttcctggctcttcgatcaagctcgacaacctgtttgcccgtagccaggtgaaaaagggatcctacggtcattcagc

SEQ ID NO: 1771 - DNA, 158 bp, synthetic construct
  misc_feature 1..158: note = Synthetic nucleic acid
  source 1..158: mol_type = other DNA
cagacgacggccagtgtcgacatggatcaaaaacagattgaagaaattgtacgcagcgtgatggcgtaacacttcttgcggcgatggttcctggctcttcgatcgcagaaagcatccggcatcaacatgacccgacctggatcctacggtcattcagc

SEQ ID NO: 1772 - DNA, 158 bp, synthetic construct
  misc_feature 1..158: note = Synthetic nucleic acid
  source 1..158: mol_type = other DNA
cagacgacggccagtgtcgacatgtcatcatcccgtccggtgttccgctcgcgctaacacttcttgcggcgatggttcctggctcttcgatcggtggtgcagttccgctatgttgaaagcaaggtgcgttaccaaatgggatcctacggtcattcagc

SEQ ID NO: 1773 - DNA, 158 bp, synthetic construct
  misc_feature 1..158: note = Synthetic nucleic acid
  source 1..158: mol_type = other DNA
cagacgacggccagtgtcgacgtgcttatcttattaggttacctggttgttctcggtacagttttcggcaacacttcttgcggcgatggttcctggctcttcgatccgcaacaacagacgacaaccgaggaagcacttggatcctacggtcattcagc

SEQ ID NO: 1774 - DNA, 158 bp, synthetic construct
  misc_feature 1..158: note = Synthetic nucleic acid
  source 1..158: mol_type = other DNA
cagacgacggccagtgtcgacgtggtacggcgtttaacttctccgcggctcgaatttgaagctaacacttcttgcggcgatggttcctggctcttcgatcctgaacttgatccggcgaatgaccagcgagccagtggtggatcctacggtcattcagc

SEQ ID NO: 1775 - DNA, 158 bp, synthetic construct
  misc_feature 1..158: note = Synthetic nucleic acid
  source 1..158: mol_type = other DNA
cagacgacggccagtgtcgacatgaaaaaaacattactggcagccggtgcggtactggcaacacttcttgcggcgatggttcctggctcttcgatcaccggctggggtggttacctggtagtaggttacaacttcggcggatcctacggtcattcagc

SEQ ID NO: 1776 - DNA, 158 bp, synthetic construct
  misc_feature 1..158: note = Synthetic nucleic acid
  source 1..158: mol_type = other DNA
cagacgacggccagtgtcgacatgaaagttggttttattggcctggggattatgggtaaaccaatgaaacacttcttgcggcgatggttcctggctcttcgatccgaaaaactggcgaaagtcgaagttactcgtgtaggatcctacggtcattcagc

SEQ ID NO: 1777 - DNA, 158 bp, synthetic construct
  misc_feature 1..158: note = Synthetic nucleic acid
  source 1..158: mol_type = other DNA
cagacgacggccagtgtcgacatgaagccttttttgcgctggtgtttcgttgcgacagcacttaaacacttcttgcggcgatggttcctggctcttcgatcggaccaagatgacctggcagaatcggaccagcaagacggatcctacggtcattcagc

SEQ ID NO: 1778 - DNA, 158 bp, synthetic construct
  misc_feature 1..158: note = Synthetic nucleic acid
  source 1..158: mol_type = other DNA
cagacgacggccagtgtcgacatgagaacaggatgtgaaccgacccggtttggtaatgaagaacacttcttgcggcgatggttcctggctcttcgatcccggttaagcgaagttgaccccgatctcattacaaaggagggatcctacggtcattcagc

SEQ ID NO: 1779 - DNA, 158 bp, synthetic construct
  misc_feature 1..158: note = Synthetic nucleic acid
  source 1..158: mol_type = other DNA
cagacgacggccagtgtcgacatgattaagaaaatttttgcccttccggtcatcgaacaaatctcccctgtaacacttcttgcggcgatggttcctggctcttcgatcgcgcaatccattcgcgttgcgaaacgtgccggatcctacggtcattcagc

SEQ ID NO: 1780 - DNA, 158 bp, synthetic construct
  misc_feature 1..158: note = Synthetic nucleic acid
  source 1..158: mol_type = other DNA
cagacgacggccagtgtcgacatgcatccacgttttcaaaccgcttttgcccaacttgcggataaaacacttcttgcggcgatggttcctggctcttcgatcggctgtcacagtatcgaccgagtgcttctcgcttatggatcctacggtcattcagc

SEQ ID NO: 1781 - DNA, 158 bp, synthetic construct
  misc_feature 1..158: note = Synthetic nucleic acid
  source 1..158: mol_type = other DNA
cagacgacggccagtgtcgacatggaacgcgtatacagaacagatcttaagttgctccgttattttcttgaacacttcttgcggcgatggttcctggctcttcgatcggttaagctgttggctgcattgacacagtatggatcctacggtcattcagc

SEQ ID NO: 1782 - DNA, 158 bp, synthetic construct
  misc_feature 1..158: note = Synthetic nucleic acid
  source 1..158: mol_type = other DNA
cagacgacggccagtgtcgacatggctatggaaacgcaggacattatcaaaaggtccgcaaaacacttcttgcggcgatggttcctggctcttcgatctaaggaagtggacgatgacgaggaggatcatcatgaggggggatcctacggtcattcagc

SEQ ID NO: 1783 - DNA, 158 bp, synthetic construct
  misc_feature 1..158: note = Synthetic nucleic acid
  source 1..158: mol_type = other DNA
cagacgacggccagtgtcgacatgtctcatttaaaagacccgaccacgcagtattacactggtgaatatcccaaaaacacttcttgcggcgatggttcctggctcttcgatctgtgcggcggcgagcatttaggtgacggatcctacggtcattcagc

SEQ ID NO: 1784 - DNA, 158 bp, synthetic construct
  misc_feature 1..158: note = Synthetic nucleic acid
  source 1..158: mol_type = other DNA
cagacgacggccagtgtcgacatgaaaggtattatcctggcgggcggttccggcacccaacacttcttgcggcgatggttcctggctcttcgatcatatctgctggagttacttcgtgcccgtccgcgccagtatttgggatcctacggtcattcagc

SEQ ID NO: 1785 - DNA, 158 bp, synthetic construct
  misc_feature 1..158: note = Synthetic nucleic acid
  source 1..158: mol_type = other DNA
cagacgacggccagtgtcgacatgaacaggcttttttcaggtcgttccgatatgccctttgcaacacttcttgcggcgatggttcctggctcttcgatcctgaccaggaaacgggtgaacctcaatggcaacaaaatgggatcctacggtcattcagc

SEQ ID NO: 1786 - DNA, 158 bp, synthetic construct
  misc_feature 1..158: note = Synthetic nucleic acid
  source 1..158: mol_type = other DNA
cagacgacggccagtgtcgacatgacacgacaaaaagcaacgctcatagggctgatagcgatcgtcctgtaacacttcttgcggcgatggttcctggctcttcgatcgctctgctggctggcgacacgtcgtggtcggggatcctacggtcattcagc

SEQ ID NO: 1787 - DNA, 158 bp, synthetic construct
  misc_feature 1..158: note = Synthetic nucleic acid
  source 1..158: mol_type = other DNA
cagacgacggccagtgtcgacatgcacatcaccctccggcagttggaagtttttgcagaagtattgaaaaaacacttcttgcggcgatggttcctggctcttcgatcctattgcgatcccgcaaatgtgccgcgtattggatcctacggtcattcagc

SEQ ID NO: 1788 - DNA, 158 bp, synthetic construct
  misc_feature 1..158: note = Synthetic nucleic acid
  source 1..158: mol_type = other DNA
cagacgacggccagtgtcgacatggatctgacccaactggagatgttcaacgcggttgccaacacttcttgcggcgatggttcctggctcttcgatctgctggatgtgcctgactcggcaagacagggatatcaaagtggatcctacggtcattcagc

SEQ ID NO: 1789 - DNA, 158 bp, synthetic construct
  misc_feature 1..158: note = Synthetic nucleic acid
  source 1..158: mol_type = other DNA
cagacgacggccagtgtcgacatggatctgcgccgttttattacgcttaaaaccgtggtaacacttcttgcggcgatggttcctggctcttcgatcacttttattcagtgtgttgaagagagttttgtggctggaaagggatcctacggtcattcagc

SEQ ID NO: 1790 - DNA, 158 bp, synthetic construct
  misc_feature 1..158: note = Synthetic nucleic acid
  source 1..158: mol_type = other DNA
cagacgacggccagtgtcgacttgagcgacacgaattatgcagtgatttacgacctgcacagcaacacttcttgcggcgatggttcctggctcttcgatcgggaacagccgcagaacaccacagagagggaattagatggatcctacggtcattcagc

SEQ ID NO: 1791 - DNA, 158 bp, synthetic construct
  misc_feature 1..158: note = Synthetic nucleic acid
  source 1..158: mol_type = other DNA
cagacgacggccagtgtcgacatgaaactgggatttattggcttaggcattatgggtacaccgataacacttcttgcggcgatggttcctggctcttcgatcgcgctggaattaatggctaaccataaactggccctgggatcctacggtcattcagc

SEQ ID NO: 1792 - DNA, 158 bp, synthetic construct
  misc_feature 1..158: note = Synthetic nucleic acid
  source 1..158: mol_type = other DNA
cagacgacggccagtgtcgacatgaaatattccttagggccagtgctgtggtactggccaaaagagacgctaacacttcttgcggcgatggttcctggctcttcgatccggctggcaggactggagctgcaagccgtgggatcctacggtcattcagc

SEQ ID NO: 1793 - DNA, 158 bp, synthetic construct
  misc_feature 1..158: note = Synthetic nucleic acid
  source 1..158: mol_type = other DNA
cagacgacggccagtgtcgacatgaataatcatttcaagtgtattggcattgtgggacacccacgaacacttcttgcggcgatggttcctggctcttcgatcagcaccaagctcggctggtcaaaaaaattattcagaggatcctacggtcattcagc

SEQ ID NO: 1794 - DNA, 158 bp, synthetic construct
  misc_feature 1..158: note = Synthetic nucleic acid
  source 1..158: mol_type = other DNA
cagacgacggccagtgtcgacatgacagctcgctacatcgcaattgactggggatcgaccaataacacttcttgcggcgatggttcctggctcttcgatcctggtataaggagcatcgctcatgcagtggcaaacagtggatcctacggtcattcagc

SEQ ID NO: 1795 - DNA, 158 bp, synthetic construct
  misc_feature 1..158: note = Synthetic nucleic acid
  source 1..158: mol_type = other DNA
cagacgacggccagtgtcgacatgacatcatccgccggacagcgcatcagctgtaacgttgtgaacacttcttgcggcgatggttcctggctcttcgatccagaacgggccggacttcaggttaccgtgggaggttggggatcctacggtcattcagc

SEQ ID NO: 1796 - DNA, 158 bp, synthetic construct
  misc_feature 1..158: note = Synthetic nucleic acid
  source 1..158: mol_type = other DNA
cagacgacggccagtgtcgacatgagcaaaaagcagagttccaccccacacgatgcgctgttaacacttcttgcggcgatggttcctggctcttcgatcgggctgtcagaagaagagttggctgcggcgagtcagagaggatcctacggtcattcagc

SEQ ID NO: 1797 - DNA, 158 bp, synthetic construct
  misc_feature 1..158: note = Synthetic nucleic acid
  source 1..158: mol_type = other DNA
cagacgacggccagtgtcgacatgagcgacgacaattcacacagtagtgacacgataagcaacaagaaaacacttcttgcggcgatggttcctggctcttcgatcgatgactcaccccagccgaagctggatgaagagggatcctacggtcattcagc

SEQ ID NO: 1798 - DNA, 158 bp, synthetic construct
  misc_feature 1..158: note = Synthetic nucleic acid
  source 1..158: mol_type = other DNA
cagacgacggccagtgtcgacatgagttttgatccgacgggttacaccctcgcaacacttcttgcggcgatggttcctggctcttcgatcgatgtggatgtgatgttacgtgaaaatccctctcaatttttccaagctggatcctacggtcattcagc

SEQ ID NO: 1799 - DNA, 158 bp, synthetic construct
  misc_feature 1..158: note = Synthetic nucleic acid
  source 1..158: mol_type = other DNA
cagacgacggccagtgtcgacatgccgcaacatgaccaattacatcgctatctgtttgaaaactttgccaacacttcttgcggcgatggttcctggctcttcgatcacgcgtctccggcagatccgcaagttcatcggggatcctacggtcattcagc

SEQ ID NO: 1800 - DNA, 158 bp, synthetic construct
  misc_feature 1..158: note = Synthetic nucleic acid
  source 1..158: mol_type = other DNA
cagacgacggccagtgtcgacatggctgaagcgcaaaatgatcccctgctgccaacacttcttgcggcgatggttcctggctcttcgatcgccggttgtgaagaaaaagtgaatgatgtagccgtcaagttgtcagcaggatcctacggtcattcagc

SEQ ID NO: 1801 - DNA, 158 bp, synthetic construct
  misc_feature 1..158: note = Synthetic nucleic acid
  source 1..158: mol_type = other DNA
cagacgacggccagtgtcgacatgtcgatgcctgcaacgtcaactaaaaccacaaagcttaacacttcttgcggcgatggttcctggctcttcgatcctgacctactgatccttacctggtttttagcacagattaatggatcctacggtcattcagc

SEQ ID NO: 1802 - DNA, 158 bp, synthetic construct
  misc_feature 1..158: note = Synthetic nucleic acid
  source 1..158: mol_type = other DNA
cagacgacggccagtgtcgacatgttcacgggaagtattgtcgcgattgttactccgatggatgaaaaaggtaataacacttcttgcggcgatggttcctggctcttcgatccgcttaagcatgccggtttgctgacaggatcctacggtcattcagc

SEQ ID NO: 1803 - DNA, 158 bp, synthetic construct
  misc_feature 1..158: note = Synthetic nucleic acid
  source 1..158: mol_type = other DNA
cagacgacggccagtgtcgacatgtttgattttgcttcttaccatcgcgcagcaacccttgccgatgccataacacttcttgcggcgatggttcctggctcttcgatcgtcgccgcggcggggggaaaattgcaaagcggatcctacggtcattcagc

SEQ ID NO: 1804 - DNA, 158 bp, synthetic construct
  misc_feature 1..158: note = Synthetic nucleic acid
  source 1..158: mol_type = other DNA
cagacgacggccagtgtcgacttgaccaagacgttacttgacggccccggtcgcgtaacacttcttgcggcgatggttcctggctcttcgatcgcgggggcaatgctcgaggaaatcttctctgtaaatttggcgcgtggatcctacggtcattcagc

SEQ ID NO: 1805 - DNA, 158 bp, synthetic construct
  misc_feature 1..158: note = Synthetic nucleic acid
  source 1..158: mol_type = other DNA
cagacgacggccagtgtcgacatgaccacactggcgattgatatcggcggtactaaacttgccgaacacttcttgcggcgatggttcctggctcttcgatctggggctgcgctgttggcccagggagaaaaattaaacggatcctacggtcattcagc

SEQ ID NO: 1806 - DNA, 158 bp, synthetic construct
  misc_feature 1..158: note = Synthetic nucleic acid
  source 1..158: mol_type = other DNA
cagacgacggccagtgtcgacatgaccagtagctatctgcattttccggagtttgatccggtcattttaacacttcttgcggcgatggttcctggctcttcgatctatcgtcgcagcccacagcaacacgtttccattggatcctacggtcattcagc

SEQ ID NO: 1807 - DNA, 158 bp, synthetic construct
  misc_feature 1..158: note = Synthetic nucleic acid
  source 1..158: mol_type = other DNA
cagacgacggccagtgtcgacatgagcgaaaagctacagaaagtgctggcgcgtgccggaacacttcttgcggcgatggttcctggctcttcgatcagcggcggtcgtcgttctggcggacgtaataataacggtattggatcctacggtcattcagc

SEQ ID NO: 1808 - DNA, 158 bp, synthetic construct
  misc_feature 1..158: note = Synthetic nucleic acid
  source 1..158: mol_type = other DNA
cagacgacggccagtgtcgacatggcggaagttacccaattgaagcgttatgacgcgcgaacacttcttgcggcgatggttcctggctcttcgatccaggaaaaacgcgcacagcaggaggaacatcatgagcattatggatcctacggtcattcagc

SEQ ID NO: 1809 - DNA, 158 bp, synthetic construct
  misc_feature 1..158: note = Synthetic nucleic acid
  source 1..158: mol_type = other DNA
cagacgacggccagtgtcgacatgaccatctataccttatcccacgggtcgctaaagctggaaacacttcttgcggcgatggttcctggctcttcgatcacaacttcagagatgtcgttgcgggtagagtggctgttcggatcctacggtcattcagc

SEQ ID NO: 1810 - DNA, 158 bp, synthetic construct
  misc_feature 1..158: note = Synthetic nucleic acid
  source 1..158: mol_type = other DNA
cagacgacggccagtgtcgacatgcgctatttcatactaatgttcactttcgtatgttcctttgttgcagcccaaccaaaacacttcttgcggcgatggttcctggctcttcgatccggcgcatccggccgctggcatggatcctacggtcattcagc

SEQ ID NO: 1811 - DNA, 158 bp, synthetic construct
  misc_feature 1..158: note = Synthetic nucleic acid
  source 1..158: mol_type = other DNA
cagacgacggccagtgtcgacatgctaaaaaccattcaggacaaagccaggcaccgtaaacacttcttgcggcgatggttcctggctcttcgatcactaaaacaagcagctgaacaagaagaagacgacgaaccacacggatcctacggtcattcagc

SEQ ID NO: 1812 - DNA, 158 bp, synthetic construct
  misc_feature 1..158: note = Synthetic nucleic acid
  source 1..158: mol_type = other DNA
cagacgacggccagtgtcgacatgctgcccgactcatcagtccgtttaaataaatacatcagcgaaagcggaatttaacacttcttgcggcgatggttcctggctcttcgatcggggcgtaaaaagaaggggcgccgtggatcctacggtcattcagc

SEQ ID NO: 1813 - DNA, 158 bp, synthetic construct
  misc_feature 1..158: note = Synthetic nucleic acid
  source 1..158: mol_type = other DNA
cagacgacggccagtgtcgacatgctggcgtttacctggatcgcgctgcgatttatccatttaacacttcttgcggcgatggttcctggctcttcgatcgtgatcatcagcctgcttgcgactctcgaaccttttaatggatcctacggtcattcagc

SEQ ID NO: 1814 - DNA, 158 bp, synthetic construct
  misc_feature 1..158: note = Synthetic nucleic acid
  source 1..158: mol_type = other DNA
cagacgacggccagtgtcgacatggagtggagtctgacgcagaataagctgctggaacacttcttgcggcgatggttcctggctcttcgatctctggtactatttttagggctggcaatgagttactggcatttcactggatcctacggtcattcagc

SEQ ID NO: 1815 - DNA, 158 bp, synthetic construct
  misc_feature 1..158: note = Synthetic nucleic acid
  source 1..158: mol_type = other DNA
cagacgacggccagtgtcgacatgtgtacaacatgcggttgcggtgaaggcaacctgtatatcgagaacacttcttgcggcgatggttcctggctcttcgatcggctgaactggctggagacacagcgatgtgcatctggatcctacggtcattcagc

SEQ ID NO: 1816 - DNA, 158 bp, synthetic construct
  misc_feature 1..158: note = Synthetic nucleic acid
  source 1..158: mol_type = other DNA
cagacgacggccagtgtcgacatgaatatgctggaaaaaatccagtctcagctggaacatttgagcaaataacacttcttgcggcgatggttcctggctcttcgatcgcagttacttaatttaagtgacgatcgcatcggatcctacggtcattcagc

SEQ ID NO: 1817 - DNA, 158 bp, synthetic construct
  misc_feature 1..158: note = Synthetic nucleic acid
  source 1..158: mol_type = other DNA
cagacgacggccagtgtcgacatgagcacttttaaaccactaaaaacactcacttcgcgccgaacacttcttgcggcgatggttcctggctcttcgatctggttcgacaaccagaaagcacattcgaaaaagcgagacggatcctacggtcattcagc

SEQ ID NO: 1818 - DNA, 158 bp, synthetic construct
  misc_feature 1..158: note = Synthetic nucleic acid
  source 1..158: mol_type = other DNA
cagacgacggccagtgtcgacatgcggactctgcagggctggttgttgccggtaacacttcttgcggcgatggttcctggctcttcgatcaaccagacccgtgtcggtgtgggggttatgctaaacgatttgtttggtggatcctacggtcattcagc

SEQ ID NO: 1819 - DNA, 158 bp, synthetic construct
  misc_feature 1..158: note = Synthetic nucleic acid
  source 1..158: mol_type = other DNA
cagacgacggccagtgtcgacatggatcaggccggcattattcgcgaccttttaatctggaacacttcttgcggcgatggttcctggctcttcgatcttaatctacgctgtgaactgctgattccgatccgtcgtttaggatcctacggtcattcagc

SEQ ID NO: 1820 - DNA, 158 bp, synthetic construct
  misc_feature 1..158: note = Synthetic nucleic acid
  source 1..158: mol_type = other DNA
cagacgacggccagtgtcgacatggccataagcatcaagggtgttaataccggtgttattcgcaaaacacttcttgcggcgatggttcctggctcttcgatccaatccaccagcaaaactgcaccacaggcgaaagacggatcctacggtcattcagc

SEQ ID NO: 1821 - DNA, 158 bp, synthetic construct
  misc_feature 1..158: note = Synthetic nucleic acid
  source 1..158: mol_type = other DNA
cagacgacggccagtgtcgacatgtccattttaatcgataaaaacaccaaggttatctgccagggctttaaacacttcttgcggcgatggttcctggctcttcgatccggtgaagcactgaaaactgttctgaaaataggatcctacggtcattcagc

SEQ ID NO: 1822 - DNA, 158 bp, synthetic construct
  misc_feature 1..158: note = Synthetic nucleic acid
  source 1..158: mol_type = other DNA
cagacgacggccagtgtcgacatgtctgccaaacatccggtcattgcggtaacaggatcaacacttcttgcggcgatggttcctggctcttcgatcccgctggtgcaacgattgatggaaggaaagaaaatcgagccgggatcctacggtcattcagc

SEQ ID NO: 1823 - DNA, 158 bp, synthetic construct
  misc_feature 1..158: note = Synthetic nucleic acid
  source 1..158: mol_type = other DNA
cagacgacggccagtgtcgacatgacagacaatacttatcagcccgcgaaagtctggacgtaacacttcttgcggcgatggttcctggctcttcgatctgatttcgagacgaatacggaagataagcgtcaggggatcggatcctacggtcattcagc

SEQ ID NO: 1824 - DNA, 158 bp, synthetic construct
  misc_feature 1..158: note = Synthetic nucleic acid
  source 1..158: mol_type = other DNA
cagacgacggccagtgtcgacatgagttatcagccacaaaccgaagccgccaccagccaacacttcttgcggcgatggttcctggctcttcgatccgctttcaatcaactggtgctgaatttcctcgcacgccctattggatcctacggtcattcagc

SEQ ID NO: 1825 - DNA, 158 bp, synthetic construct
  misc_feature 1..158: note = Synthetic nucleic acid
  source 1..158: mol_type = other DNA
cagacgacggccagtgtcgacatggatgttaccgcaaaatacgaattgattgggttgatggcctataacacttcttgcggcgatggttcctggctcttcgatcaatatgttaaacaggtcatggggttcggtgccgaaggatcctacggtcattcagc

SEQ ID NO: 1826 - DNA, 158 bp, synthetic construct
  misc_feature 1..158: note = Synthetic nucleic acid
  source 1..158: mol_type = other DNA
cagacgacggccagtgtcgacatggcagcaaagattattgacggtaaaacgattgcgcagaacacttcttgcggcgatggttcctggctcttcgatctacaggcgtgcgttgaatatcatgatccacaggatgagatgggatcctacggtcattcagc

SEQ ID NO: 1827 - DNA, 158 bp, synthetic construct
  misc_feature 1..158: note = Synthetic nucleic acid
  source 1..158: mol_type = other DNA
cagacgacggccagtgtcgacatggccgaaaaaaaacagtggcatgaaacgctacacgaccagtttaacacttcttgcggcgatggttcctggctcttcgatcatctgcaagacgcactggcttcacagccgtccacaggatcctacggtcattcagc

SEQ ID NO: 1828 - DNA, 158 bp, synthetic construct
  misc_feature 1..158: note = Synthetic nucleic acid
  source 1..158: mol_type = other DNA
cagacgacggccagtgtcgacatgaaaaattttgaagttctgcagccactacagaactccctttccggtaacacttcttgcggcgatggttcctggctcttcgatctggcccgcgctgtctgggatttcttcttcggatcctacggtcattcagccgc

SEQ ID NO: 1829 - DNA, 158 bp, synthetic construct
  misc_feature 1..158: note = Synthetic nucleic acid
  source 1..158: mol_type = other DNA
cagacgacggccagtgtcgacatgaacagcagatgcgctttagtcagtaagattatccccttctcaacacttcttgcggcgatggttcctggctcttcgatcgtgagccggttgatatttccggcgctctatttgcagggatcctacggtcattcagc

SEQ ID NO: 1830 - DNA, 158 bp, synthetic construct
  misc_feature 1..158: note = Synthetic nucleic acid
  source 1..158: mol_type = other DNA
cagacgacggccagtgtcgacatgaataattctgaaggtttgaagtcgtttcagcaatcgcttgctgatctaacacttcttgcggcgatggttcctggctcttcgatcgcccgcgccgtctgggatttcttcttcgaaggatcctacggtcattcagc

SEQ ID NO: 1831 - DNA, 158 bp, synthetic construct
  misc_feature 1..158: note = Synthetic nucleic acid
  source 1..158: mol_type = other DNA
cagacgacggccagtgtcgacatgatccgcagtatgaccgcctacgcccggcgtaacacttcttgcggcgatggttcctggctcttcgatcaagtgttgattgagcagatgcgcgagcagattcagaacatcgaacgtggatcctacggtcattcagc

SEQ ID NO: 1832 - DNA, 158 bp, synthetic construct
  misc_feature 1..158: note = Synthetic nucleic acid
  source 1..158: mol_type = other DNA
cagacgacggccagtgtcgacatgatgaaaaatattctcgctatccagtctcacgttgtttatggtcatgcaacacttcttgcggcgatggttcctggctcttcgatcgaacattacttcagcgcaacaaagctcgctggatcctacggtcattcagc

SEQ ID NO: 1833 - DNA, 158 bp, synthetic construct
  misc_feature 1..158: note = Synthetic nucleic acid
  source 1..158: mol_type = other DNA
cagacgacggccagtgtcgacatgcgttggcaagggcgacgtgaaagtgacaatgttaacacttcttgcggcgatggttcctggctcttcgatcgcggcgatccggcacaatgcaatacttttggtaaaagcattaggggatcctacggtcattcagc

SEQ ID NO: 1834 - DNA, 158 bp, synthetic construct
  misc_feature 1..158: note = Synthetic nucleic acid
  source 1..158: mol_type = other DNA
cagacgacggccagtgtcgacatggcaaatcgtaaacgtgacgccgggcgcgaaacacttcttgcggcgatggttcctggctcttcgatcgatgtatttacaataactacacgatggagttcgggagcgaaatcattaggatcctacggtcattcagc

SEQ ID NO: 1835 - DNA, 158 bp, synthetic construct
  misc_feature 1..158: note = Synthetic nucleic acid
  source 1..158: mol_type = other DNA
cagacgacggccagtgtcgacatggccggcgcaaaagagatacgtagtaagatcgcaagcgtccagaacacaacacttcttgcggcgatggttcctggctcttcgatcgagatcgtctcgggggccgccgcggtttggggatcctacggtcattcagc

SEQ ID NO: 1836 - DNA, 158 bp, synthetic construct
  misc_feature 1..158: note = Synthetic nucleic acid
  source 1..158: mol_type = other DNA
cagacgacggccagtgtcgacatgggaagtggatggcatgaatggccgctgatgatcttcacggtaacacttcttgcggcgatggttcctggctcttcgatcttgcatatgaccgtggggatggccgtcgcaagctgcggatcctacggtcattcagc

SEQ ID NO: 1837 - DNA, 158 bp, synthetic construct
  misc_feature 1..158: note = Synthetic nucleic acid
  source 1..158: mol_type = other DNA
cagacgacggccagtgtcgacgtgtgggcgctaactgcggatgcggattttctggcaacacttcttgcggcgatggttcctggctcttcgatcggttgtgcgctgagccaaacctacggagggaattatgtcagtctcggatcctacggtcattcagc

SEQ ID NO: 1838 - DNA, 158 bp, synthetic construct
  misc_feature 1..158: note = Synthetic nucleic acid
  source 1..158: mol_type = other DNA
cagacgacggccagtgtcgacatgaaacaacaccaatcggcggataattctcagggccagctttacattaacacttcttgcggcgatggttcctggctcttcgatctgtataagtatgcgctggagcagcaggggaagggatcctacggtcattcagc

SEQ ID NO: 1839 - DNA, 158 bp, synthetic construct
  misc_feature 1..158: note = Synthetic nucleic acid
  source 1..158: mol_type = other DNA
cagacgacggccagtgtcgacatgaatatcgcaattgtgacaataaatcaggagaatgccgcaatagcaaaacacttcttgcggcgatggttcctggctcttcgatcggtgacaaacattcacgcagattgccaattaggatcctacggtcattcagc

SEQ ID NO: 1840 - DNA, 158 bp, synthetic construct
  misc_feature 1..158: note = Synthetic nucleic acid
  source 1..158: mol_type = other DNA
cagacgacggccagtgtcgacatgacttcatctctgccctgtgggcaaacgtctttattgttacaaacacttcttgcggcgatggttcctggctcttcgatccgtggtcagacggtgtatgcgctaagtaaggatacgggatcctacggtcattcagc

SEQ ID NO: 1841 - DNA, 158 bp, synthetic construct
  misc_feature 1..158: note = Synthetic nucleic acid
  source 1..158: mol_type = other DNA
cagacgacggccagtgtcgacatgagcagcaatacatttactctcggtacaaaatccgttaaccgtaacacttcttgcggcgatggttcctggctcttcgatctgttgtctacgttggatggtatttcgcgagaatgcggatcctacggtcattcagc

SEQ ID NO: 1842 - DNA, 158 bp, synthetic construct
  misc_feature 1..158: note = Synthetic nucleic acid
  source 1..158: mol_type = other DNA
cagacgacggccagtgtcgacatgagcattatctccactaaatatctgttacaggacgcccaggcaacacttcttgcggcgatggttcctggctcttcgatcaatgtctgtggttcagcgaatcgaatttcagcattgggatcctacggtcattcagc

SEQ ID NO: 1843 - DNA, 158 bp, synthetic construct
  misc_feature 1..158: note = Synthetic nucleic acid
  source 1..158: mol_type = other DNA
cagacgacggccagtgtcgacatgatcgctattactggtgccactggccaacttggtaacacttcttgcggcgatggttcctggctcttcgatccgttagccgaaagcgtaagccatctttttaatgttaataacaaaggatcctacggtcattcagc

SEQ ID NO: 1844 - DNA, 158 bp, synthetic construct
  misc_feature 1..158: note = Synthetic nucleic acid
  source 1..158: mol_type = other DNA
cagacgacggccagtgtcgacatggaagatttgaatgttgtcgatagcataaacggcgcggaacacttcttgcggcgatggttcctggctcttcgatctgtgaactttaagcgggtgaaagaagacaaagctgcgttcggatcctacggtcattcagc

SEQ ID NO: 1845 - DNA, 158 bp, synthetic construct
  misc_feature 1..158: note = Synthetic nucleic acid
  source 1..158: mol_type = other DNA
cagacgacggccagtgtcgacatgtggcaggcaatcagtcgtcttttgagcgaaacacttcttgcggcgatggttcctggctcttcgatccatttggttattgctcagcagtcattggatagattattagcagcatcgggatcctacggtcattcagc

SEQ ID NO: 1846 - DNA, 158 bp, synthetic construct
  misc_feature 1..158: note = Synthetic nucleic acid
  source 1..158: mol_type = other DNA
cagacgacggccagtgtcgacgtgcgtaatcatcagttagggatttatgaaaaagcgctggcaacacttcttgcggcgatggttcctggctcttcgatcattgaagcgcgtatgcaggaggctggatttatatgttttggatcctacggtcattcagc

SEQ ID NO: 1847 - DNA, 158 bp, synthetic construct
  misc_feature 1..158: note = Synthetic nucleic acid
  source 1..158: mol_type = other DNA
cagacgacggccagtgtcgacatgaaagcaccaggcttgcccgccgatcaacaatttttcgccgataacacttcttgcggcgatggttcctggctcttcgatccgccgggagagtacagcgcccgttttcagggctgtggatcctacggtcattcagc

SEQ ID NO: 1848 - DNA, 158 bp, synthetic construct
  misc_feature 1..158: note = Synthetic nucleic acid
  source 1..158: mol_type = other DNA
cagacgacggccagtgtcgacatgaaatacattggagcgcacgttagtgctgctggcggtaacacttcttgcggcgatggttcctggctcttcgatccctggctgaaagcgcaacaaactgaaaaagcggtagccattggatcctacggtcattcagc

SEQ ID NO: 1849 - DNA, 158 bp, synthetic construct
  misc_feature 1..158: note = Synthetic nucleic acid
  source 1..158: mol_type = other DNA
cagacgacggccagtgtcgacatgagcgaaacttttttccatctgctggggccaggaacgcaaccaacacttcttgcggcgatggttcctggctcttcgatcgtatgtcagtggctggcggaagctgcaccgacggccggatcctacggtcattcagc

SEQ ID NO: 1850 - DNA, 158 bp, synthetic construct
  misc_feature 1..158: note = Synthetic nucleic acid
  source 1..158: mol_type = other DNA
cagacgacggccagtgtcgacatgatttatcctgatgaagcaatgctttacgcaccggttgaataacacttcttgcggcgatggttcctggctcttcgatctcagcctgacttcagcaaattcaaacggaatccggtaggatcctacggtcattcagc

SEQ ID NO: 1851 - DNA, 158 bp, synthetic construct
  misc_feature 1..158: note = Synthetic nucleic acid
  source 1..158: mol_type = other DNA
cagacgacggccagtgtcgacatgctgtttgtgcttattctaagccaccgggcagcatcatacggggaacacttcttgcggcgatggttcctggctcttcgatcggatagtgcgatcccgccaggcttcagggggggtggatcctacggtcattcagc

SEQ ID NO: 1852 - DNA, 158 bp, synthetic construct
  misc_feature 1..158: note = Synthetic nucleic acid
  source 1..158: mol_type = other DNA
cagacgacggccagtgtcgacatggctaccaaactgcaggacgggaatacaccttgtctggaacacttcttgcggcgatggttcctggctcttcgatccggcttcgaaacgctcgaaaaactggcagttttaggctgcggatcctacggtcattcagc

SEQ ID NO: 1853 - DNA, 158 bp, synthetic construct
  misc_feature 1..158: note = Synthetic nucleic acid
  source 1..158: mol_type = other DNA
cagacgacggccagtgtcgacatggctattccaaaattacaggcttacgcactgccggagtctcaaacacttcttgcggcgatggttcctggctcttcgatcgcctggtggaagctactctcccgcgaggtgaaaggcggatcctacggtcattcagc

SEQ ID NO: 1854 - DNA, 158 bp, synthetic construct
  misc_feature 1..158: note = Synthetic nucleic acid
  source 1..158: mol_type = other DNA
cagacgacggccagtgtcgacatgttgtacctgacgaaaataagcaatgcggggagtgaattcaccaacacttcttgcggcgatggttcctggctcttcgatcagcgcagcagtgagctaacacaacgcctgaaagcgggatcctacggtcattcagc

SEQ ID NO: 1855 - DNA, 158 bp, synthetic construct
  misc_feature 1..158: note = Synthetic nucleic acid
  source 1..158: mol_type = other DNA
cagacgacggccagtgtcgacgtgaaagctgacaacccttttgatcttttacttcctgctgcaataacacttcttgcggcgatggttcctggctcttcgatctgggtcatttacctgcgtgaaaacgaccaccatgagggatcctacggtcattcagc

SEQ ID NO: 1856 - DNA, 158 bp, synthetic construct
  misc_feature 1..158: note = Synthetic nucleic acid
  source 1..158: mol_type = other DNA
cagacgacggccagtgtcgacttgctgaagtatcgcctgatatctgcttttgtgttaatacccgtaacacttcttgcggcgatggttcctggctcttcgatcgcttgcttgttgttactggtattcaggacgcttcctggatcctacggtcattcagc

SEQ ID NO: 1857 - DNA, 158 bp, synthetic construct
  misc_feature 1..158: note = Synthetic nucleic acid
  source 1..158: mol_type = other DNA
cagacgacggccagtgtcgacatgaaacaaaaagtggttagcattggcgacatcaacgtagcaaataacacttcttgcggcgatggttcctggctcttcgatctgaaaggtttcgaagaactggataccagcaagcgtggatcctacggtcattcagc

SEQ ID NO: 1858 - DNA, 158 bp, synthetic construct
  misc_feature 1..158: note = Synthetic nucleic acid
  source 1..158: mol_type = other DNA
cagacgacggccagtgtcgacatgacgctatttacaaccttactggtgttaattttcgagcgcctaacacttcttgcggcgatggttcctggctcttcgatcattgcactactgacgatttacggggcgttggtgagtggatcctacggtcattcagc

SEQ ID NO: 1859 - DNA, 158 bp, synthetic construct
  misc_feature 1..158: note = Synthetic nucleic acid
  source 1..158: mol_type = other DNA
cagacgacggccagtgtcgacatgactgacaaaatgcaaagtttagctttagccccagttggcaaaacacttcttgcggcgatggttcctggctcttcgatcgcgatgaaaaaattgcgtgctgccattgaagcgaacggatcctacggtcattcagc

SEQ ID NO: 1860 - DNA, 158 bp, synthetic construct
  misc_feature 1..158: note = Synthetic nucleic acid
  source 1..158: mol_type = other DNA
cagacgacggccagtgtcgacatgcaacaaaaaatgattcaatttagtggcgatgtctcactgccaaacacttcttgcggcgatggttcctggctcttcgatccaccaaaaggaaaaactgcgctggatatggtgctaggatcctacggtcattcagc

SEQ ID NO: 1861 - DNA, 158 bp, synthetic construct
  misc_feature 1..158: note = Synthetic nucleic acid
  source 1..158: mol_type = other DNA
cagacgacggccagtgtcgacatggatgcccttagccgtttgttgatgcttaacgctccacaaaacacttcttgcggcgatggttcctggctcttcgatcgagaatatcgggaaagggtcagacagcttgcacccgggggatcctacggtcattcagc

SEQ ID NO: 1862 - DNA, 158 bp, synthetic construct
  misc_feature 1..158: note = Synthetic nucleic acid
  source 1..158: mol_type = other DNA
cagacgacggccagtgtcgacatggcactgccagtgaacaaacgcgttcccaaaattctaacacttcttgcggcgatggttcctggctcttcgatcatggtggactttatccttagcgcgttgaatccgcagaacagcggatcctacggtcattcagc

SEQ ID NO: 1863 - DNA, 158 bp, synthetic construct
  misc_feature 1..158: note = Synthetic nucleic acid
  source 1..158: mol_type = other DNA
cagacgacggccagtgtcgacatgggaaatggatggcatgagtggccactggttatctttaccaacacttcttgcggcgatggttcctggctcttcgatcgcctgcacatgacagtaggaatggctattgcaggttctggatcctacggtcattcagc

SEQ ID NO: 1864 - DNA, 158 bp, synthetic construct
  misc_feature 1..158: note = Synthetic nucleic acid
  source 1..158: mol_type = other DNA
cagacgacggccagtgtcgacatggtactgatgatcgtcagcggacgttcaggttcaggtaaataacacttcttgcggcgatggttcctggctcttcgatcgtcacgccatcgtacgctggaaaaacgtaaaccatcaggatcctacggtcattcagc

SEQ ID NO: 1865 - DNA, 158 bp, synthetic construct
  misc_feature 1..158: note = Synthetic nucleic acid
  source 1..158: mol_type = other DNA
cagacgacggccagtgtcgacatgtacgtggtatcgacaaagcagatgctgaacaacgcacagcgcgaacacttcttgcggcgatggttcctggctcttcgatcgattgccgattgtggctgcgagggcagggcagatggatcctacggtcattcagc

SEQ ID NO: 1866 - DNA, 158 bp, synthetic construct
  misc_feature 1..158: note = Synthetic nucleic acid
  source 1..158: mol_type = other DNA
cagacgacggccagtgtcgacatgttgtccaaacaaatcccgcttggcatctatgaaaaagcgctccccgcaacacttcttgcggcgatggttcctggctcttcgatcgcgaaagcgggcatggtggaggcggcaggcggatcctacggtcattcagc

SEQ ID NO: 1867 - DNA, 158 bp, synthetic construct
  misc_feature 1..158: note = Synthetic nucleic acid
  source 1..158: mol_type = other DNA
cagacgacggccagtgtcgacatgactgttcaaacaagtaaaaatccgcaggtcgatattgctgaagataataacacttcttgcggcgatggttcctggctcttcgatcaggaaatgctggcagcttacgcgggttgcggatcctacggtcattcagc

SEQ ID NO: 1868 - DNA, 158 bp, synthetic construct
  misc_feature 1..158: note = Synthetic nucleic acid
  source 1..158: mol_type = other DNA
cagacgacggccagtgtcgacatgagtagtttgttgttgtttaacgataagagtagggcactgcaggcgaacacttcttgcggcgatggttcctggctcttcgatcaattgattttgccgccgctggcggaagcaagtggatcctacggtcattcagc

SEQ ID NO: 1869 - DNA, 158 bp, synthetic construct
  misc_feature 1..158: note = Synthetic nucleic acid
  source 1..158: mol_type = other DNA
cagacgacggccagtgtcgacatgagtgaacgtctgagcattaccccgctggggccgtatataacacttcttgcggcgatggttcctggctcttcgatcacgatccttggggataaaccgttttatcgggcggggcaaggatcctacggtcattcagc

SEQ ID NO: 1870 - DNA, 158 bp, synthetic construct
  misc_feature 1..158: note = Synthetic nucleic acid
  source 1..158: mol_type = other DNA
cagacgacggccagtgtcgacatgcggacacagtggccctctccggcaaaacttaatctaacacttcttgcggcgatggttcctggctcttcgatcaaaggcgctaatctttccccattgcacagagccatgcttgaaggatcctacggtcattcagc

SEQ ID NO: 1871 - DNA, 158 bp, synthetic construct
  misc_feature 1..158: note = Synthetic nucleic acid
  source 1..158: mol_type = other DNA
cagacgacggccagtgtcgacatggctgaaattaccgcatccctggtaaaagagctgcgtgaaacacttcttgcggcgatggttcctggctcttcgatctttgcagcagaagttgctgcgatgtccaagcagtctaccggatcctacggtcattcagc

SEQ ID NO: 1872 - DNA, 158 bp, synthetic construct
  misc_feature 1..158: note = Synthetic nucleic acid
  source 1..158: mol_type = other DNA
cagacgacggccagtgtcgacatggttgatacaactcaaactaccaccgagaaaaaactcactcaaagtgatattcaacacttcttgcggcgatggttcctggctcttcgatccgcttgcggcctgctgggactggtcggatcctacggtcattcagc

SEQ ID NO: 1873 - DNA, 158 bp, synthetic construct
  misc_feature 1..158: note = Synthetic nucleic acid
  source 1..158: mol_type = other DNA
cagacgacggccagtgtcgacatgtatcacgacgtcagctatctgctctcccgcctaacacttcttgcggcgatggttcctggctcttcgatccagtaccacagccaactgacagaaaaaccgactactccagaatttggatcctacggtcattcagc

SEQ ID NO: 1874 - DNA, 158 bp, synthetic construct
  misc_feature 1..158: note = Synthetic nucleic acid
  source 1..158: mol_type = other DNA
cagacgacggccagtgtcgacgtgaaagtactcaacgagctaaggcagttttatcctcttgatgagcttaacacttcttgcggcgatggttcctggctcttcgatcatcggaatcagacctatatgcctcgtgttcttggatcctacggtcattcagc

SEQ ID NO: 1875 - DNA, 158 bp, synthetic construct
  misc_feature 1..158: note = Synthetic nucleic acid
  source 1..158: mol_type = other DNA
cagacgacggccagtgtcgacgtgttaattatcgaaaccctgccgctgctgcgtcagcaaattaacacttcttgcggcgatggttcctggctcttcgatcctcgcctgatcgacaacaaaatggtcgagctggcgttgggatcctacggtcattcagc

SEQ ID NO: 1876 - DNA, 158 bp, synthetic construct
  misc_feature 1..158: note = Synthetic nucleic acid
  source 1..158: mol_type = other DNA
cagacgacggccagtgtcgacatgaaactctttgcccagggtacttcactggaccttagcaacacttcttgcggcgatggttcctggctcttcgatcaagccactctgtctgcaaaggaaaacaaacgctatgagtgtggatcctacggtcattcagc

SEQ ID NO: 1877 - DNA, 158 bp, synthetic construct
  misc_feature 1..158: note = Synthetic nucleic acid
  source 1..158: mol_type = other DNA
cagacgacggccagtgtcgacatgaaacttattcctcgcagtagtgatatttcacctggcattgatggaatttaacacttcttgcggcgatggttcctggctcttcgatctggcgatagtcgtacacagttcactacaggatcctacggtcattcagc

SEQ ID NO: 1878 - DNA, 158 bp, synthetic construct
  misc_feature 1..158: note = Synthetic nucleic acid
  source 1..158: mol_type = other DNA
cagacgacggccagtgtcgacatgaacggcttacttcgtatccgtcagcgttaccaggaacacttcttgcggcgatggttcctggctcttcgatcacgtattcgtcatagtgaagcgctggtgaaaaaactggtcggtggatcctacggtcattcagc

SEQ ID NO: 1879 - DNA, 158 bp, synthetic construct
  misc_feature 1..158: note = Synthetic nucleic acid
  source 1..158: mol_type = other DNA
cagacgacggccagtgtcgacatgagaaacaaactctctttcgacttgcagttgagcgcaacacttcttgcggcgatggttcctggctcttcgatcagtatgtgttatcgggctatttatttacgtcaggaaccccatggatcctacggtcattcagc

SEQ ID NO: 1880 - DNA, 158 bp, synthetic construct
  misc_feature 1..158: note = Synthetic nucleic acid
  source 1..158: mol_type = other DNA
cagacgacggccagtgtcgacatggggaaagaagtgatgggaaaaaaagagaacgagatggcgcaaacacttcttgcggcgatggttcctggctcttcgatctttactgtcagggatgacctgggcgcgatcacattgggatcctacggtcattcagc

SEQ ID NO: 1881 - DNA, 158 bp, synthetic construct
  misc_feature 1..158: note = Synthetic nucleic acid
  source 1..158: mol_type = other DNA
cagacgacggccagtgtcgacatgtataccctgaactggcagccgccgtatgactggtaacacttcttgcggcgatggttcctggctcttcgatcgcatatctggtatacggaaggctggcaaccagacgaagcacctggatcctacggtcattcagc

SEQ ID NO: 1882 - DNA, 158 bp, synthetic construct
  misc_feature 1..158: note = Synthetic nucleic acid
  source 1..158: mol_type = other DNA
cagacgacggccagtgtcgacatgtcttcttatgcaaaccatcaggcacttgcgggcctgaaacacttcttgcggcgatggttcctggctcttcgatccgattttgtcccatcgaccacaagactggttcggcaacctggatcctacggtcattcagc

SEQ ID NO: 1883 - DNA, 158 bp, synthetic construct
  misc_feature 1..158: note = Synthetic nucleic acid
  source 1..158: mol_type = other DNA
cagacgacggccagtgtcgacgtggcgcatcagttaaaacttctcaaagatgatttttttgccagcaacacttcttgcggcgatggttcctggctcttcgatcgccagtggcgtcatctcaattcgcagaaagatcttggatcctacggtcattcagc

SEQ ID NO: 1884 - DNA, 158 bp, synthetic construct
  misc_feature 1..158: note = Synthetic nucleic acid
  source 1..158: mol_type = other DNA
cagacgacggccagtgtcgacatgaataatttaccggtagttcgttcgccctggcggattgtgattttgctaacacttcttgcggcgatggttcctggctcttcgatccgcgacatccagcgtgcaagacgtggcaagggatcctacggtcattcagc

SEQ ID NO: 1885 - DNA, 158 bp, synthetic construct
  misc_feature 1..158: note = Synthetic nucleic acid
  source 1..158: mol_type = other DNA
cagacgacggccagtgtcgacatgacgcccattctgaatcactattttgcccgtattaactggtcgggaaacacttcttgcggcgatggttcctggctcttcgatccgtttgatacgcacccggaggcgggaaaatcaggatcctacggtcattcagc

SEQ ID NO: 1886 - DNA, 158 bp, synthetic construct
  misc_feature 1..158: note = Synthetic nucleic acid
  source 1..158: mol_type = other DNA
cagacgacggccagtgtcgacatgagtcaaacatcaaccttgaaaggccagtgcattgctaacacttcttgcggcgatggttcctggctcttcgatcaggaaaccacaactccttcagaacaaaaagcttcgctgatcggatcctacggtcattcagc

SEQ ID NO: 1887 - DNA, 158 bp, synthetic construct
  misc_feature 1..158: note = Synthetic nucleic acid
  source 1..158: mol_type = other DNA
cagacgacggccagtgtcgacatgattgagaaccgtccgtggctgacgatattcagccataccatgaacacttcttgcggcgatggttcctggctcttcgatcccttcgtgcgcggcctggtcgatagtgagaaagcgggatcctacggtcattcagc

SEQ ID NO: 1888 - DNA, 158 bp, synthetic construct
  misc_feature 1..158: note = Synthetic nucleic acid
  source 1..158: mol_type = other DNA
cagacgacggccagtgtcgacatggctaatctgagcggctacaactttgcctacctcgacgaaacacttcttgcggcgatggttcctggctcttcgatcgattattgccgccaacagagcgaggcaaaaaaccaagcaggatcctacggtcattcagc

SEQ ID NO: 1889 - DNA, 158 bp, synthetic construct
  misc_feature 1..158: note = Synthetic nucleic acid
  source 1..158: mol_type = other DNA
cagacgacggccagtgtcgacatgtccacgacatggtttgtaggagccgactggctcgccgaaaacacttcttgcggcgatggttcctggctcttcgatcgcgcgcgggcagatttaccggttgagccagtgaaacgaggatcctacggtcattcagc

SEQ ID NO: 1890 - DNA, 158 bp, synthetic construct
  misc_feature 1..158: note = Synthetic nucleic acid
  source 1..158: mol_type = other DNA
cagacgacggccagtgtcgacatgatgcagccagtgattaacgcgccggaaattaacacttcttgcggcgatggttcctggctcttcgatcttacgcctaagagctatcgtaagaaattgactgaatttaatcaggggggatcctacggtcattcagc

SEQ ID NO: 1891 - DNA, 158 bp, synthetic construct
  misc_feature 1..158: note = Synthetic nucleic acid
  source 1..158: mol_type = other DNA
cagacgacggccagtgtcgacatgcattcactccaacgtaaagttctgcgtactatttgtccgaacacttcttgcggcgatggttcctggctcttcgatcgcgtctttgtttacggtaatcgaacgattattctttttggatcctacggtcattcagc

SEQ ID NO: 1892 - DNA, 158 bp, synthetic construct
  misc_feature 1..158: note = Synthetic nucleic acid
  source 1..158: mol_type = other DNA
cagacgacggccagtgtcgacatgctcagttatcgccacagctttcacgctggcaaccacgccgaaacacttcttgcggcgatggttcctggctcttcgatcgggcacgccaccgtaagctggatcgtgccggaggaaggatcctacggtcattcagc

SEQ ID NO: 1893 - DNA, 158 bp, synthetic construct
  misc_feature 1..158: note = Synthetic nucleic acid
  source 1..158: mol_type = other DNA
cagacgacggccagtgtcgacatggcaacaaataaacgcacactcagtcgcatcggtttttactgcgggaacacttcttgcggcgatggttcctggctcttcgatcgtggtttgaccgccggtggcgtgaagggcggaggatcctacggtcattcagc

SEQ ID NO: 1894 - DNA, 158 bp, synthetic construct
  misc_feature 1..158: note = Synthetic nucleic acid
  source 1..158: mol_type = other DNA
cagacgacggccagtgtcgacatggcgacataccttattggcgacgttcatggttgttacgatgaactaacacttcttgcggcgatggttcctggctcttcgatccataaggatttgggcgaagcggcggcgtcttgtggatcctacggtcattcagc

SEQ ID NO: 1895 - DNA, 158 bp, synthetic construct
  misc_feature 1..158: note = Synthetic nucleic acid
  source 1..158: mol_type = other DNA
cagacgacggccagtgtcgacatgaaaaacaatccgctgatctcaatctatatgccgacctggaaccgaacacttcttgcggcgatggttcctggctcttcgatcaaacgtctggctgatggtattcgggggcgctccggatcctacggtcattcagc

SEQ ID NO: 1896 - DNA, 158 bp, synthetic construct
  misc_feature 1..158: note = Synthetic nucleic acid
  source 1..158: mol_type = other DNA
cagacgacggccagtgtcgacgtggatacggaattgttaaaaactttcctggaagttagccgaacgaacacttcttgcggcgatggttcctggctcttcgatcttttgaaaattaacgtgctggatgaagtgtatactggatcctacggtcattcagc

SEQ ID NO: 1897 - DNA, 158 bp, synthetic construct
  misc_feature 1..158: note = Synthetic nucleic acid
  source 1..158: mol_type = other DNA
cagacgacggccagtgtcgacatgaacatgcaaatcaccaaaattctcaacaataatgttgtggtggttattgatgataacacttcttgcggcgatggttcctggctcttcgatcagcgcgtgcgcaaagaacacgtgggatcctacggtcattcagc

SEQ ID NO: 1898 - DNA, 158 bp, synthetic construct
  misc_feature 1..158: note = Synthetic nucleic acid
  source 1..158: mol_type = other DNA
cagacgacggccagtgtcgacatgaagaaaaatcgcgcttttttgaagtgggcagggggaacacttcttgcggcgatggttcctggctcttcgatcgctttgtacaaaccaggagtcgtttcacccgcgaaaaaattcggatcctacggtcattcagc

SEQ ID NO: 1899 - DNA, 158 bp, synthetic construct
  misc_feature 1..158: note = Synthetic nucleic acid
  source 1..158: mol_type = other DNA
cagacgacggccagtgtcgacatgaccgtattacatagtgtggatttttttccgtctggtaacgcgtccaacacttcttgcggcgatggttcctggctcttcgatcttcgccagggacgggatggctttctgcaaggtggatcctacggtcattcagc

SEQ ID NO: 1900 - DNA, 158 bp, synthetic construct
  misc_feature 1..158: note = Synthetic nucleic acid
  source 1..158: mol_type = other DNA
cagacgacggccagtgtcgacatgctcgcagatatcagatattgggaaaacgatgccacaaataaacattataacacttcttgcggcgatggttcctggctcttcgatctgttcggttctgatggcaaagcggaagagggatcctacggtcattcagc

SEQ ID NO: 1901 - DNA, 158 bp, synthetic construct
  misc_feature 1..158: note = Synthetic nucleic acid
  source 1..158: mol_type = other DNA
cagacgacggccagtgtcgacatggcgcacgacgaacaatggctcaccccacgtctaacacttcttgcggcgatggttcctggctcttcgatcgccagtagtgggcgagagaaagcggaggggctatatgcaaaaacaggatcctacggtcattcagc

SEQ ID NO: 1902 - DNA, 158 bp, synthetic construct
  misc_feature 1..158: note = Synthetic nucleic acid
  source 1..158: mol_type = other DNA
cagacgacggccagtgtcgacgtggacgtaagacagagcatccacagtgcgcacgaacacttcttgcggcgatggttcctggctcttcgatcggtctttgatgatatggaccatgtggccgttaaagatttgcgcctaggatcctacggtcattcagc

SEQ ID NO: 1903 - DNA, 158 bp, synthetic construct
  misc_feature 1..158: note = Synthetic nucleic acid
  source 1..158: mol_type = other DNA
cagacgacggccagtgtcgacatgcagaacaatgagcagacggaatacaaaaccgtgcgcggcttaaaacacttcttgcggcgatggttcctggctcttcgatcggccggaaggcgaagcggcatgcatttacgtcctggatcctacggtcattcagc

SEQ ID NO: 1904 - DNA, 158 bp, synthetic construct
  misc_feature 1..158: note = Synthetic nucleic acid
  source 1..158: mol_type = other DNA
cagacgacggccagtgtcgacatgcagcgcttatttcttttggttgccgtcatgttactgagaacacttcttgcggcgatggttcctggctcttcgatcgtgaaataccgccatatgtcggttccaccggaatcctgtggatcctacggtcattcagc

SEQ ID NO: 1905 - DNA, 158 bp, synthetic construct
  misc_feature 1..158: note = Synthetic nucleic acid
  source 1..158: mol_type = other DNA
cagacgacggccagtgtcgacatggaactcattgaaaaacatgtcagctttggcggctgaacacttcttgcggcgatggttcctggctcttcgatcgagcatattgcctaccacgccaataaactgaatatgcgtttaggatcctacggtcattcagc

SEQ ID NO: 1906 - DNA, 158 bp, synthetic construct
  misc_feature 1..158: note = Synthetic nucleic acid
  source 1..158: mol_type = other DNA
cagacgacggccagtgtcgacatggaatatcaacactggttacgtgaagcaataagccaacttcaggcaacacttcttgcggcgatggttcctggctcttcgatcgagcgcgtaacgctcggccgctattatcaatcgggatcctacggtcattcagc

SEQ ID NO: 1907 - DNA, 158 bp, synthetic construct
  misc_feature 1..158: note = Synthetic nucleic acid
  source 1..158: mol_type = other DNA
cagacgacggccagtgtcgacatggataatgctgttgatcgccacgttttttatatttctgatggtacggaacacttcttgcggcgatggttcctggctcttcgatctatcatgggccttagtcgccgaatgtactcaggatcctacggtcattcagc

SEQ ID NO: 1908 - DNA, 158 bp, synthetic construct
  misc_feature 1..158: note = Synthetic nucleic acid
  source 1..158: mol_type = other DNA
cagacgacggccagtgtcgacatgtctcaggttcaattttctcataacccgctgttttgcatagatattatcaagaaacacttcttgcggcgatggttcctggctcttcgatctggctttctgcgcaaaattgcccagggatcctacggtcattcagc

SEQ ID NO: 1909 - DNA, 158 bp, synthetic construct
  misc_feature 1..158: note = Synthetic nucleic acid
  source 1..158: mol_type = other DNA
cagacgacggccagtgtcgacatgtttgctgtctcctccagacgcgtgctgccggaacacttcttgcggcgatggttcctggctcttcgatctaacactctgcaaagtcgctttggtcggcgtgtggtaggtcatgtaggatcctacggtcattcagc

SEQ ID NO: 1910 - DNA, 158 bp, synthetic construct
  misc_feature 1..158: note = Synthetic nucleic acid
  source 1..158: mol_type = other DNA
cagacgacggccagtgtcgacgtgaaaaaaacacagcgaaaagaaatcgaaaatgtgacaaatatcacaggtgttaacacttcttgcggcgatggttcctggctcttcgatccccatccgcagcgtttgagcaatattggatcctacggtcattcagc

SEQ ID NO: 1911 - DNA, 158 bp, synthetic construct
  misc_feature 1..158: note = Synthetic nucleic acid
  source 1..158: mol_type = other DNA
cagacgacggccagtgtcgacgtgaactttttcctctcttcccgctggtcggtacgcctggcaacacttcttgcggcgatggttcctggctcttcgatccatctggaccctcatctggtgacggagcacgcacaccccggatcctacggtcattcagc

SEQ ID NO: 1912 - DNA, 158 bp, synthetic construct
  misc_feature 1..158: note = Synthetic nucleic acid
  source 1..158: mol_type = other DNA
cagacgacggccagtgtcgacatgaaaacaggtatgtttacctgcggccaccagcggctgcctattgaaaacacttcttgcggcgatggttcctggctcttcgatcttcgcgcgctgctgccggaggatgagagaaccggatcctacggtcattcagc

SEQ ID NO: 1913 - DNA, 158 bp, synthetic construct
  misc_feature 1..158: note = Synthetic nucleic acid
  source 1..158: mol_type = other DNA
cagacgacggccagtgtcgacatgagaagattcttctggctggtcgctgccgctctgttattaacacttcttgcggcgatggttcctggctcttcgatcattgccgaagcattgctggagaaatacgggcaggatcagggatcctacggtcattcagc

SEQ ID NO: 1914 - DNA, 158 bp, synthetic construct
  misc_feature 1..158: note = Synthetic nucleic acid
  source 1..158: mol_type = other DNA
cagacgacggccagtgtcgacatgtcgcaggctgctctgaacacgcgaaacagaacacttcttgcggcgatggttcctggctcttcgatcgaggaatctactcagcaacaaaatcaggcacaggcagaacaacaactcggatcctacggtcattcagc

SEQ ID NO: 1915 - DNA, 158 bp, synthetic construct
  misc_feature 1..158: note = Synthetic nucleic acid
  source 1..158: mol_type = other DNA
cagacgacggccagtgtcgacatgttgatgattacctcttttgctaacccccgcgtggcaacacttcttgcggcgatggttcctggctcttcgatcatggcttttgttgattcgctcaatgcgcgaaaacgaaaagtgggatcctacggtcattcagc

SEQ ID NO: 1916 - DNA, 158 bp, synthetic construct
  misc_feature 1..158: note = Synthetic nucleic acid
  source 1..158: mol_type = other DNA
cagacgacggccagtgtcgacatgacattgcaacaacaaataataaaggcgctgggcgcaaaaaacacttcttgcggcgatggttcctggctcttcgatccgccaattaccgttttcgatgatttctggaaaaagtctggatcctacggtcattcagc

SEQ ID NO: 1917 - DNA, 158 bp, synthetic construct
  misc_feature 1..158: note = Synthetic nucleic acid
  source 1..158: mol_type = other DNA
cagacgacggccagtgtcgacatgagtgtgctcattaatgaaaaactgcattcgcggcggctgaaataacacttcttgcggcgatggttcctggctcttcgatcccgcctgacgccctggcatggagaagtacaagagggatcctacggtcattcagc

SEQ ID NO: 1918 - DNA, 158 bp, synthetic construct
  misc_feature 1..158: note = Synthetic nucleic acid
  source 1..158: mol_type = other DNA
cagacgacggccagtgtcgacatggctaatccaaccgttattaagctacaggatggcaatgtcatgccccaaacacttcttgcggcgatggttcctggctcttcgatcggtcccgatcctgaccagttcggcggcaccggatcctacggtcattcagc

SEQ ID NO: 1919 - DNA, 158 bp, synthetic construct
  misc_feature 1..158: note = Synthetic nucleic acid
  source 1..158: mol_type = other DNA
cagacgacggccagtgtcgacgtgattgtcactattgtcggttggcttgtgttgtttgtctttctaacacttcttgcggcgatggttcctggctcttcgatctctcgtttgctgaataagaaggtggaactcgaagggggatcctacggtcattcagc

SEQ ID NO: 1920 - DNA, 158 bp, synthetic construct
  misc_feature 1..158: note = Synthetic nucleic acid
  source 1..158: mol_type = other DNA
cagacgacggccagtgtcgacttggaaagcctgttaacccttcctctggctggtgaggaacacttcttgcggcgatggttcctggctcttcgatcggacacacgtttccaacctgataccgcttcagaaggctacgagggatcctacggtcattcagc

SEQ ID NO: 1921 - DNA, 158 bp, synthetic construct
  misc_feature 1..158: note = Synthetic nucleic acid
  source 1..158: mol_type = other DNA
cagacgacggccagtgtcgacatgaaaaaggtcgcaattgtcgggttagggtggttaggcatgcaacacttcttgcggcgatggttcctggctcttcgatcccagtatcccgatccgctggtaatgccgctggagcacggatcctacggtcattcagc

SEQ ID NO: 1922 - DNA, 158 bp, synthetic construct
  misc_feature 1..158: note = Synthetic nucleic acid
  source 1..158: mol_type = other DNA
cagacgacggccagtgtcgacatgaataaaaccgcgattgcgctgctggctctgcttgccaaacacttcttgcggcgatggttcctggctcttcgatcgccttcctgccaggcgctactggatgagcacgtgatcacgggatcctacggtcattcagc

SEQ ID NO: 1923 - DNA, 158 bp, synthetic construct
  misc_feature 1..158: note = Synthetic nucleic acid
  source 1..158: mol_type = other DNA
cagacgacggccagtgtcgacatgaccgaatttacaactcttcttcagcaaggaaacgcctgaacacttcttgcggcgatggttcctggctcttcgatctatatgggcgtacatggcttcatgggcataatgcgactgggatcctacggtcattcagc

SEQ ID NO: 1924 - DNA, 158 bp, synthetic construct
  misc_feature 1..158: note = Synthetic nucleic acid
  source 1..158: mol_type = other DNA
cagacgacggccagtgtcgacatgattttgactcccatacgacgatatggggcgatgattcttatgttaaacacttcttgcggcgatggttcctggctcttcgatcataaccaacggttaatcgcggcgcatatgttgggatcctacggtcattcagc

SEQ ID NO: 1925 - DNA, 158 bp, synthetic construct
  misc_feature 1..158: note = Synthetic nucleic acid
  source 1..158: mol_type = other DNA
cagacgacggccagtgtcgacatgcaaaacattactcagtcctggtttgtccagggaatgatcaaagccaccacaacacttcttgcggcgatggttcctggctcttcgatcccactcgccagtgcgctggcgctggcgggatcctacggtcattcagc

SEQ ID NO: 1926 - DNA, 158 bp, synthetic construct
  misc_feature 1..158: note = Synthetic nucleic acid
  source 1..158: mol_type = other DNA
cagacgacggccagtgtcgacatgcagcagttacagaacattattgaaaccgcttttgaacgccgtaacacttcttgcggcgatggttcctggctcttcgatctcggcattaacgaactgctgcgtaccatcgacaggggatcctacggtcattcagc

SEQ ID NO: 1927 - DNA, 158 bp, synthetic construct
  misc_feature 1..158: note = Synthetic nucleic acid
  source 1..158: mol_type = other DNA
cagacgacggccagtgtcgacatgcagttctcgaaaatgcatggccttggcaacgattttataacacttcttgcggcgatggttcctggctcttcgatcccggcggtacatgtctacgacggatttattcatctactcggatcctacggtcattcagc

SEQ ID NO: 1928 - DNA, 158 bp, synthetic construct
  misc_feature 1..158: note = Synthetic nucleic acid
  source 1..158: mol_type = other DNA
cagacgacggccagtgtcgacatggataaaccaaaggcgtactgccgcctgtttctcccaacacttcttgcggcgatggttcctggctcttcgatcatttatatcaaggcgggtcgctttgttggtttgacccgggtaggatcctacggtcattcagc

SEQ ID NO: 1929 - DNA, 158 bp, synthetic construct
  misc_feature 1..158: note = Synthetic nucleic acid
  source 1..158: mol_type = other DNA
cagacgacggccagtgtcgacatggtcgcacccattcccgcgaaacgcggcagaaaacccgaacacttcttgcggcgatggttcctggctcttcgatcggcgaaggaagtgacgctggcgtacggtggaatgcgcgctggatcctacggtcattcagc

SEQ ID NO: 1930 - DNA, 158 bp, synthetic construct
  misc_feature 1..158: note = Synthetic nucleic acid
  source 1..158: mol_type = other DNA
cagacgacggccagtgtcgacatgtctcagaacttagacgcaaccgcaattaatcaaatccatgcaacacttcttgcggcgatggttcctggctcttcgatcaaagtagaaacctttattggtactttcaccgccggatcctacggtcattcagccgc

SEQ ID NO: 1931 - DNA, 158 bp, synthetic construct
  misc_feature 1..158: note = Synthetic nucleic acid
  source 1..158: mol_type = other DNA
cagacgacggccagtgtcgacgtgccgtttcgcagcaataatcccatcacgcgcgaaacacttcttgcggcgatggttcctggctcttcgatcaggctggccgatgacacctggcggcagctattaataaaacaactaggatcctacggtcattcagc

SEQ ID NO: 1932 - DNA, 158 bp, synthetic construct
  misc_feature 1..158: note = Synthetic nucleic acid
  source 1..158: mol_type = other DNA
cagacgacggccagtgtcgacatgaaaatactacgatggttgttcgctctggtcatgcttattgctaaacacttcttgcggcgatggttcctggctcttcgatcttgccggttccagtacatactgaatgagttgatgggatcctacggtcattcagc

SEQ ID NO: 1933 - DNA, 158 bp, synthetic construct
  misc_feature 1..158: note = Synthetic nucleic acid
  source 1..158: mol_type = other DNA
cagacgacggccagtgtcgacatgaataatcgagtccaccagggccacttagcccgtaaacgcttaacacttcttgcggcgatggttcctggctcttcgatctatctggcggagaacgcgcctttgcaggagagtcttggatcctacggtcattcagc

SEQ ID NO: 1934 - DNA, 158 bp, synthetic construct
  misc_feature 1..158: note = Synthetic nucleic acid
  source 1..158: mol_type = other DNA
cagacgacggccagtgtcgacatgacccgtctggcttcgcgctttggcgcagcaaaccttatcaacacttcttgcggcgatggttcctggctcttcgatcgggtgatggcggaagccctgctcacgcaactgcaggggggatcctacggtcattcagc

SEQ ID NO: 1935 - DNA, 158 bp, synthetic construct
  misc_feature 1..158: note = Synthetic nucleic acid
  source 1..158: mol_type = other DNA
cagacgacggccagtgtcgacatgacccgtctggcttcgcgctttggcgctgcaaataacacttcttgcggcgatggttcctggctcttcgatccgctgtgggtgatggcagaaacactgctcacgcaactgcagaacggatcctacggtcattcagc

SEQ ID NO: 1936 - DNA, 158 bp, synthetic construct
  misc_feature 1..158: note = Synthetic nucleic acid
  source 1..158: mol_type = other DNA
cagacgacggccagtgtcgacatgagcgatatgcactcgctgctgatagcggcaatattggaacacttcttgcggcgatggttcctggctcttcgatcctttattgtggcggctgcggtgtatgtcgtgttctttcatggatcctacggtcattcagc

SEQ ID NO: 1937 - DNA, 158 bp, synthetic construct
  misc_feature 1..158: note = Synthetic nucleic acid
  source 1..158: mol_type = other DNA
cagacgacggccagtgtcgacatgatgcacaggttgaatctcaatggctatgaacccgaccgacaccataacacttcttgcggcgatggttcctggctcttcgatccacaatcagcgaaaccagacccgcggcaaatgggatcctacggtcattcagc

SEQ ID NO: 1938 - DNA, 158 bp, synthetic construct
  misc_feature 1..158: note = Synthetic nucleic acid
  source 1..158: mol_type = other DNA
cagacgacggccagtgtcgacatgcatgatgcaaacatccgcgttgccatcgcaacacttcttgcggcgatggttcctggctcttcgatcagcggtctttttgatatgcgagatgtacttgatctcaataatttggcaggatcctacggtcattcagc

SEQ ID NO: 1939 - DNA, 158 bp, synthetic construct
  misc_feature 1..158: note = Synthetic nucleic acid
  source 1..158: mol_type = other DNA
cagacgacggccagtgtcgacatgcgtacaaccattgctgtagtgttgggtgcaattagtttgaaacacttcttgcggcgatggttcctggctcttcgatcttttcgcgacaagctggatcaactgtcgcaaaaaaacggatcctacggtcattcagc

SEQ ID NO: 1940 - DNA, 158 bp, synthetic construct
  misc_feature 1..158: note = Synthetic nucleic acid
  source 1..158: mol_type = other DNA
cagacgacggccagtgtcgacatggcagttgttaaatgtaaaccgacatctccgggtcgtaacacttcttgcggcgatggttcctggctcttcgatcagcgtactgataaattcatcgtacgtcgccgtagcaaacggggatcctacggtcattcagc

SEQ ID NO: 1941 - DNA, 158 bp, synthetic construct
  misc_feature 1..158: note = Synthetic nucleic acid
  source 1..158: mol_type = other DNA
cagacgacggccagtgtcgacatgtcgtgtgaagaactggaaattgtctggaacaatattaaagccgaaaacacttcttgcggcgatggttcctggctcttcgatcaccatacatttgagtatggggatgggatcccaggatcctacggtcattcagc

SEQ ID NO: 1942 - DNA, 158 bp, synthetic construct
  misc_feature 1..158: note = Synthetic nucleic acid
  source 1..158: mol_type = other DNA
cagacgacggccagtgtcgacatgaaactgacaacacatcatctacggacaggggccgcattattgctaacacttcttgcggcgatggttcctggctcttcgatcatttttaacggtggcgcggtgcctggctggagcggatcctacggtcattcagc

SEQ ID NO: 1943 - DNA, 158 bp, synthetic construct
  misc_feature 1..158: note = Synthetic nucleic acid
  source 1..158: mol_type = other DNA
cagacgacggccagtgtcgacatgaccacacgcgtgattgctctcgacttagacggcaaacacttcttgcggcgatggttcctggctcttcgatccaccgacagcattgcccagttcatttatagccacctgattgatggatcctacggtcattcagc

SEQ ID NO: 1944 - DNA, 158 bp, synthetic construct
  misc_feature 1..158: note = Synthetic nucleic acid
  source 1..158: mol_type = other DNA
cagacgacggccagtgtcgacatgatttacatcggtctaccgcaatggtcgcatcctaaatgaacacttcttgcggcgatggttcctggctcttcgatcgcagttccggctattccacagcaatcttctcttttcataggatcctacggtcattcagc

SEQ ID NO: 1945 - DNA, 158 bp, synthetic construct
  misc_feature 1..158: note = Synthetic nucleic acid
  source 1..158: mol_type = other DNA
cagacgacggccagtgtcgacatgcagctaagaattaccagtcgaaaaaaactcacctctctattatgcgaacacttcttgcggcgatggttcctggctcttcgatcattcgttgatgggattaaagaaacgccttgtggatcctacggtcattcagc

SEQ ID NO: 1946 - DNA, 158 bp, synthetic construct
  misc_feature 1..158: note = Synthetic nucleic acid
  source 1..158: mol_type = other DNA
cagacgacggccagtgtcgacatggaaacctatgctgtttttggtaatccgatagcccacagaacacttcttgcggcgatggttcctggctcttcgatcccagttataaagcaattgcaggaggaattgtccgcgattggatcctacggtcattcagc

SEQ ID NO: 1947 - DNA, 158 bp, synthetic construct
  misc_feature 1..158: note = Synthetic nucleic acid
  source 1..158: mol_type = other DNA
cagacgacggccagtgtcgacatggctcgtctggcagcatttgatatggatggcactttattaacacttcttgcggcgatggttcctggctcttcgatctggctggactatccacatctaccttattcccccgaaagtggatcctacggtcattcagc

SEQ ID NO: 1948 - DNA, 158 bp, synthetic construct
  misc_feature 1..158: note = Synthetic nucleic acid
  source 1..158: mol_type = other DNA
cagacgacggccagtgtcgacatgaccgaatcagtagcccgtttgcgcggcgaacagttaacaacacttcttgcggcgatggttcctggctcttcgatcccgctcggacgaacggcaccttcaaccgcaaatagtacgggatcctacggtcattcagc

SEQ ID NO: 1949 - DNA, 158 bp, synthetic construct
  misc_feature 1..158: note = Synthetic nucleic acid
  source 1..158: mol_type = other DNA
cagacgacggccagtgtcgacatgacgatcatccatcctctgcttgccagtagtagcgaacacttcttgcggcgatggttcctggctcttcgatcggggttctggcttggccaacaattattacaaggaaaaccacggggatcctacggtcattcagc

SEQ ID NO: 1950 - DNA, 158 bp, synthetic construct
  misc_feature 1..158: note = Synthetic nucleic acid
  source 1..158: mol_type = other DNA
cagacgacggccagtgtcgacatgacggaagttagacggcgcggcaggccaggacaggaacacttcttgcggcgatggttcctggctcttcgatcccgcgatatcagcacggcgttgggactgaaagcacatccaagtggatcctacggtcattcagc

SEQ ID NO: 1951 - DNA, 158 bp, synthetic construct
  misc_feature 1..158: note = Synthetic nucleic acid
  source 1..158: mol_type = other DNA
cagacgacggccagtgtcgacatgagcgtaaaagttatcgtcacagacatggacggtacttttcttaacaacacttcttgcggcgatggttcctggctcttcgatctgctggataacacatccccttttaacagcgtgggatcctacggtcattcagc

SEQ ID NO: 1952 - DNA, 158 bp, synthetic construct
  misc_feature 1..158: note = Synthetic nucleic acid
  source 1..158: mol_type = other DNA
cagacgacggccagtgtcgacatgcagtattggggaaaaatcattggcgtggccgtaacacttcttgcggcgatggttcctggctcttcgatccagcaggcatatgagctgataaagcagcagaaagggtttaaatttggatcctacggtcattcagc

SEQ ID NO: 1953 - DNA, 158 bp, synthetic construct
  misc_feature 1..158: note = Synthetic nucleic acid
  source 1..158: mol_type = other DNA
cagacgacggccagtgtcgacatggcaacaacacaacaatctggatttgcacctgctgcataacacttcttgcggcgatggttcctggctcttcgatcggaatggtttaagcagtatggtgggaagaagtcgctggcaggatcctacggtcattcagc

SEQ ID NO: 1954 - DNA, 158 bp, synthetic construct
  misc_feature 1..158: note = Synthetic nucleic acid
  source 1..158: mol_type = other DNA
cagacgacggccagtgtcgacatggcgttcaaattcaaaacctttgcggcagtgggagcaacacttcttgcggcgatggttcctggctcttcgatcgcaaacaaagtgtttaacggcggagctgttaaaggctgggttggatcctacggtcattcagc

SEQ ID NO: 1955 - DNA, 158 bp, synthetic construct
  misc_feature 1..158: note = Synthetic nucleic acid
  source 1..158: mol_type = other DNA
cagacgacggccagtgtcgacatggcttcagaaaatatgacgccgcaggattacataggacaaacacttcttgcggcgatggttcctggctcttcgatcacgatcgtctatctgtcgatggcgtctgaagaacatgatggatcctacggtcattcagc

SEQ ID NO: 1956 - DNA, 158 bp, synthetic construct
  misc_feature 1..158: note = Synthetic nucleic acid
  source 1..158: mol_type = other DNA
cagacgacggccagtgtcgacatgttttcaattcaacaaccactactggtttttagcgatcttgatggcaaacacttcttgcggcgatggttcctggctcttcgatcagggctggaccattttttctccgcccgtacgggatcctacggtcattcagc

SEQ ID NO: 1957 - DNA, 158 bp, synthetic construct
  misc_feature 1..158: note = Synthetic nucleic acid
  source 1..158: mol_type = other DNA
cagacgacggccagtgtcgacgtgcccacactacgtttccccttccatctggcgaataacacttcttgcggcgatggttcctggctcttcgatcaacttacaggaatgaatggactgcgtcatgaaaggactcaaatgggatcctacggtcattcagc

SEQ ID NO: 1958 - DNA, 158 bp, synthetic construct
  misc_feature 1..158: note = Synthetic nucleic acid
  source 1..158: mol_type = other DNA
cagacgacggccagtgtcgacgtggcgcggataaaccgtatttcgatcacgctctgtgctttaaacacttcttgcggcgatggttcctggctcttcgatcgcgctcgtcgggtaatgaccccaaaaacacttcgcgcgggatcctacggtcattcagc

SEQ ID NO: 1959 - DNA, 158 bp, synthetic construct
  misc_feature 1..158: note = Synthetic nucleic acid
  source 1..158: mol_type = other DNA
cagacgacggccagtgtcgacatgaaatcactgtttaaagtaacgctgctggcgaccacaataacacttcttgcggcgatggttcctggctcttcgatcgaagctgatgcgaaagccgcagattctgctaaaaaagtcggatcctacggtcattcagc

SEQ ID NO: 1960 - DNA, 158 bp, synthetic construct
  misc_feature 1..158: note = Synthetic nucleic acid
  source 1..158: mol_type = other DNA
cagacgacggccagtgtcgacatgagcgatctgcataacgagtccatttttattaccggcggcggataacacttcttgcggcgatggttcctggctcttcgatccattcgccacgtagcggctgggctggatcttttaggatcctacggtcattcagc

SEQ ID NO: 1961 - DNA, 158 bp, synthetic construct
  misc_feature 1..158: note = Synthetic nucleic acid
  source 1..158: mol_type = other DNA
cagacgacggccagtgtcgacatgatcattacacaagcagacctgcgagaatggcgtataacacttcttgcggcgatggttcctggctcttcgatccgctatcgtcttaatgaacagcatcagtttgttgagtgcaggggatcctacggtcattcagc

SEQ ID NO: 1962 - DNA, 158 bp, synthetic construct
  misc_feature 1..158: note = Synthetic nucleic acid
  source 1..158: mol_type = other DNA
cagacgacggccagtgtcgacatgatttcacgccgccgatttttgcaggctactgccgcaacacttcttgcggcgatggttcctggctcttcgatcctgaactgccgcccggaagtaacgatgctggaactggtgaaaggatcctacggtcattcagc

SEQ ID NO: 1963 - DNA, 158 bp, synthetic construct
  misc_feature 1..158: note = Synthetic nucleic acid
  source 1..158: mol_type = other DNA
cagacgacggccagtgtcgacatggcacgcattattgttgttacttcgggcaaagggggtaacacttcttgcggcgatggttcctggctcttcgatcaagagaagaaaggcttcctcaaacgcttgttcggaggagtgggatcctacggtcattcagc

SEQ ID NO: 1964 - DNA, 158 bp, synthetic construct
  misc_feature 1..158: note = Synthetic nucleic acid
  source 1..158: mol_type = other DNA
cagacgacggccagtgtcgacatggctattaaactcattgctatcgatatggatggcacccttctgaacacttcttgcggcgatggttcctggctcttcgatctggcgtttgctattgagaagtatgtgctgaatgttggatcctacggtcattcagc

SEQ ID NO: 1965 - DNA, 158 bp, synthetic construct
  misc_feature 1..158: note = Synthetic nucleic acid
  source 1..158: mol_type = other DNA
cagacgacggccagtgtcgacatgtccgaccagcaacaaccgccagtttataaaattgcgctgggaacacttcttgcggcgatggttcctggctcttcgatcaaaccgccaatgggcccgctatttctggcggacttaggatcctacggtcattcagc

SEQ ID NO: 1966 - DNA, 158 bp, synthetic construct
  misc_feature 1..158: note = Synthetic nucleic acid
  source 1..158: mol_type = other DNA
cagacgacggccagtgtcgacatgacgaagcatactcttgagcaactggcggcggatttacaacacttcttgcggcgatggttcctggctcttcgatcgacattttcaagcgcagccccaaaaggaagtctgtcagcgggatcctacggtcattcagc

SEQ ID NO: 1967 - DNA, 158 bp, synthetic construct
  misc_feature 1..158: note = Synthetic nucleic acid
  source 1..158: mol_type = other DNA
cagacgacggccagtgtcgacatgactaagcaaccaccaatcgcaaaagccgatctgaacacttcttgcggcgatggttcctggctcttcgatctattaaccggggaatacagtgtaatcgataattcagaggaatttggatcctacggtcattcagc

SEQ ID NO: 1968 - DNA, 158 bp, synthetic construct
  misc_feature 1..158: note = Synthetic nucleic acid
  source 1..158: mol_type = other DNA
cagacgacggccagtgtcgacatgactcataaagcaacggagatcctgacaggtaaagttatgcaaaaataacacttcttgcggcgatggttcctggctcttcgatcgcgcgtgatggacaaaatattgcagggggtcggatcctacggtcattcagc

SEQ ID NO: 1969 - DNA, 158 bp, synthetic construct
  misc_feature 1..158: note = Synthetic nucleic acid
  source 1..158: mol_type = other DNA
cagacgacggccagtgtcgacatgagatcgttagctgatttcgaatttaataaagcgccattgtgcgaaaacacttcttgcggcgatggttcctggctcttcgatcacatcgcgcataaacatattgtgctgcataggggatcctacggtcattcagc

SEQ ID NO: 1970 - DNA, 158 bp, synthetic construct
  misc_feature 1..158: note = Synthetic nucleic acid
  source 1..158: mol_type = other DNA
cagacgacggccagtgtcgacatgagtaataccgacgcttcaggtgagaagcgagtgactggcaaacacttcttgcggcgatggttcctggctcttcgatcaaaggctggggttgaagtgattctggtcggggagggcggatcctacggtcattcagc

SEQ ID NO: 1971 - DNA, 158 bp, synthetic construct
  misc_feature 1..158: note = Synthetic nucleic acid
  source 1..158: mol_type = other DNA
cagacgacggccagtgtcgacatgagttacgaaatcaaaatttgcgacatcctcaaaggcgctaacacttcttgcggcgatggttcctggctcttcgatctgcttcccaactggattgataagctgggagacgaagcgggatcctacggtcattcagc

SEQ ID NO: 1972 - DNA, 158 bp, synthetic construct
  misc_feature 1..158: note = Synthetic nucleic acid
  source 1..158: mol_type = other DNA
cagacgacggccagtgtcgacatgcctgaattacccgaagttgaaaccagccgccgcggcataaacacttcttgcggcgatggttcctggctcttcgatcagcgggcaacgttttattgtcggcagtgccagaaggtgggatcctacggtcattcagc

SEQ ID NO: 1973 - DNA, 158 bp, synthetic construct
  misc_feature 1..158: note = Synthetic nucleic acid
  source 1..158: mol_type = other DNA
cagacgacggccagtgtcgacatgctttttgatgtttttcagcaataccccacggcgataacacttcttgcggcgatggttcctggctcttcgatcctgggcggtatagcaacactttatctacaggcattgtttacaggatcctacggtcattcagc

SEQ ID NO: 1974 - DNA, 158 bp, synthetic construct
  misc_feature 1..158: note = Synthetic nucleic acid
  source 1..158: mol_type = other DNA
cagacgacggccagtgtcgacatggaaaagaaaatcggttttattggctgcggcaatatgggaaaaaacacttcttgcggcgatggttcctggctcttcgatcgtatggaaaaatcagaaaaactcagcaaatccgtgggatcctacggtcattcagc

SEQ ID NO: 1975 - DNA, 158 bp, synthetic construct
  misc_feature 1..158: note = Synthetic nucleic acid
  source 1..158: mol_type = other DNA
cagacgacggccagtgtcgacatggaaacgtttaatagcctgtttatggtttccccgctgttgctaacacttcttgcggcgatggttcctggctcttcgatcggacaggagatcctccactggttggggatgaactggggatcctacggtcattcagc

SEQ ID NO: 1976 - DNA, 158 bp, synthetic construct
  misc_feature 1..158: note = Synthetic nucleic acid
  source 1..158: mol_type = other DNA
cagacgacggccagtgtcgacatggagcagtctgtggcgaatttagtcgatatgcgcgatgtaacacttcttgcggcgatggttcctggctcttcgatcgccggcgattatcacgctgatcttttaccagggagtacaggatcctacggtcattcagc

SEQ ID NO: 1977 - DNA, 158 bp, synthetic construct
  misc_feature 1..158: note = Synthetic nucleic acid
  source 1..158: mol_type = other DNA
cagacgacggccagtgtcgacatgtctttttcctgtccactttgccatcagcctctttcgaacacttcttgcggcgatggttcctggctcttcgatcagacggactttaatattcacctctggcagcgttcttatccgggatcctacggtcattcagc

SEQ ID NO: 1978 - DNA, 158 bp, synthetic construct
  misc_feature 1..158: note = Synthetic nucleic acid
  source 1..158: mol_type = other DNA
cagacgacggccagtgtcgacatgttcttaattaacggtcataagcaggaatcgctggcagtaagcaacacttcttgcggcgatggttcctggctcttcgatcaatatttagccccactttgtgagcgcccgaatgtgggatcctacggtcattcagc

SEQ ID NO: 1979 - DNA, 158 bp, synthetic construct
  misc_feature 1..158: note = Synthetic nucleic acid
  source 1..158: mol_type = other DNA
cagacgacggccagtgtcgacatgaaagcattctggcgtaacgccgcgttgctaacacttcttgcggcgatggttcctggctcttcgatcccaggtaactgtggcaaaacctttgtgattgataaagcgggttatttgggatcctacggtcattcagc

SEQ ID NO: 1980 - DNA, 158 bp, synthetic construct
  misc_feature 1..158: note = Synthetic nucleic acid
  source 1..158: mol_type = other DNA
cagacgacggccagtgtcgacatgaaatttgtctcttttaatatcaacggcctgcgcgccagacctcaccagcttaacacttcttgcggcgatggttcctggctcttcgatcccgtctgggcgaccttccgccgcgtcggatcctacggtcattcagc

SEQ ID NO: 1981 - DNA, 158 bp, synthetic construct
  misc_feature 1..158: note = Synthetic nucleic acid
  source 1..158: mol_type = other DNA
cagacgacggccagtgtcgacatgactttacttaacatctccggcctttcccatcactatgcgcacggtaacacttcttgcggcgatggttcctggctcttcgatcccgtgcgccgtcgcaccacagaaaaggttcctggatcctacggtcattcagc

SEQ ID NO: 1982 - DNA, 158 bp, synthetic construct
  misc_feature 1..158: note = Synthetic nucleic acid
  source 1..158: mol_type = other DNA
cagacgacggccagtgtcgacatgagttggctgaaagaggttattgggacggaaaaagcgaacacttcttgcggcgatggttcctggctcttcgatctcagtcagtttatggagaaagtgcatcatatacgccgactaggatcctacggtcattcagc

SEQ ID NO: 1983 - DNA, 158 bp, synthetic construct
  misc_feature 1..158: note = Synthetic nucleic acid
  source 1..158: mol_type = other DNA
cagacgacggccagtgtcgacatgatcgaaacgctgcttgaagtgcgtaatttaagtaaaacgttccgctaaacacttcttgcggcgatggttcctggctcttcgatcacggcggatgcgtggcgtaaagatcgccccggatcctacggtcattcagc

SEQ ID NO: 1984 - DNA, 158 bp, synthetic construct
  misc_feature 1..158: note = Synthetic nucleic acid
  source 1..158: mol_type = other DNA
cagacgacggccagtgtcgacatggaacgctacgaatctctgtttgcccagttgaaggagcgcaaaaacacttcttgcggcgatggttcctggctcttcgatcttgtacaaccgatgaaagcggcgacgcgcagtattggatcctacggtcattcagc

SEQ ID NO: 1985 - DNA, 158 bp, synthetic construct
  misc_feature 1..158: note = Synthetic nucleic acid
  source 1..158: mol_type = other DNA
cagacgacggccagtgtcgacatgtctgtggtaattagtgatgcatggcgtcagcgttttggtggcaaacacttcttgcggcgatggttcctggctcttcgatcgaagatgatggcgaaagcggcgcgtcagggtaatggatcctacggtcattcagc

SEQ ID NO: 1986 - DNA, 158 bp, synthetic construct
  misc_feature 1..158: note = Synthetic nucleic acid
  source 1..158: mol_type = other DNA
cagacgacggccagtgtcgacatgtttacagacactattaataagtgtgcggctaacgctgcgaacacttcttgcggcgatggttcctggctcttcgatccggacaaatttaatcaaactgaaacggctgccggtgtcggatcctacggtcattcagc

SEQ ID NO: 1987 - DNA, 158 bp, synthetic construct
  misc_feature 1..158: note = Synthetic nucleic acid
  source 1..158: mol_type = other DNA
cagacgacggccagtgtcgacatgaaagatttcatcaccgaagcatggctaagagcgaaccatacgaacacttcttgcggcgatggttcctggctcttcgatcagcagatccaacaacgactgggggaaacgcaactcggatcctacggtcattcagc

SEQ ID NO: 1988 - DNA, 158 bp, synthetic construct
  misc_feature 1..158: note = Synthetic nucleic acid
  source 1..158: mol_type = other DNA
cagacgacggccagtgtcgacatgaacgcattattaagcaatccctttaaagaacgtttacgcaagggaacacttcttgcggcgatggttcctggctcttcgatcaaaaatgggccacgcataaaaggtagttataacggatcctacggtcattcagc

SEQ ID NO: 1989 - DNA, 158 bp, synthetic construct
  misc_feature 1..158: note = Synthetic nucleic acid
  source 1..158: mol_type = other DNA
cagacgacggccagtgtcgacatgcatccgatgctgaacatcgccgtgcgcgcagcaacacttcttgcggcgatggttcctggctcttcgatcctggcgaacatgcgtgacgagttaagcgacgctctgaagcgttcaggatcctacggtcattcagc

SEQ ID NO: 1990 - DNA, 158 bp, synthetic construct
  misc_feature 1..158: note = Synthetic nucleic acid
  source 1..158: mol_type = other DNA
cagacgacggccagtgtcgacatgcatgaaataaccctacttcagggattatccctggcggaacacttcttgcggcgatggttcctggctcttcgatccagtaaaaatgaagaagaggactacagcaatgggatcgcaggatcctacggtcattcagc

SEQ ID NO: 1991 - DNA, 158 bp, synthetic construct
  misc_feature 1..158: note = Synthetic nucleic acid
  source 1..158: mol_type = other DNA
cagacgacggccagtgtcgacatggctatccctgcatttggtttaggtactttccgtctgaaagacgaaacacttcttgcggcgatggttcctggctcttcgatcagcccggaaggtctggctcctgaatgggataaaggatcctacggtcattcagc

SEQ ID NO: 1992 - DNA, 158 bp, synthetic construct
  misc_feature 1..158: note = Synthetic nucleic acid
  source 1..158: mol_type = other DNA
cagacgacggccagtgtcgacatgaaacgaattaacgctctgacgattgccggtactgatccgagtggtaacacttcttgcggcgatggttcctggctcttcgatcgtccggttcaccacttccacgcctggtggtatggatcctacggtcattcagc

SEQ ID NO: 1993 - DNA, 158 bp, synthetic construct
  misc_feature 1..158: note = Synthetic nucleic acid
  source 1..158: mol_type = other DNA
cagacgacggccagtgtcgacatgaaactttcactctcacctcccccttatgctgatgcgcccgtaaacacttcttgcggcgatggttcctggctcttcgatcccagcctgttacatcaccgtgaagccgccctgacgggatcctacggtcattcagc

SEQ ID NO: 1994 - DNA, 158 bp, synthetic construct
  misc_feature 1..158: note = Synthetic nucleic acid
  source 1..158: mol_type = other DNA
cagacgacggccagtgtcgacatgaaattagcacatctgggacgtcaggcattgatgggtaacacttcttgcggcgatggttcctggctcttcgatcccctttccgaaaaatggtttggtgctgatgtgaccaaacccggatcctacggtcattcagc

SEQ ID NO: 1995 - DNA, 158 bp, synthetic construct
  misc_feature 1..158: note = Synthetic nucleic acid
  source 1..158: mol_type = other DNA
cagacgacggccagtgtcgacatgaacattaccccgtttccgacgctttcgccggcaactataaacacttcttgcggcgatggttcctggctcttcgatctgctcatcgaggcgatggaaagtcgctcgttacgtactggatcctacggtcattcagc

SEQ ID NO: 1996 - DNA, 158 bp, synthetic construct
  misc_feature 1..158: note = Synthetic nucleic acid
  source 1..158: mol_type = other DNA
cagacgacggccagtgtcgacatgagactgatccccctgactaccgctgaacaggtaacacttcttgcggcgatggttcctggctcttcgatcagatatttcaatgaattagaagcagaaaatatcaaaggtctgactggatcctacggtcattcagc

SEQ ID NO: 1997 - DNA, 158 bp, synthetic construct
  misc_feature 1..158: note = Synthetic nucleic acid
  source 1..158: mol_type = other DNA
cagacgacggccagtgtcgacatggagattaccactcttcaaattgtgctggtatttatcgtagcctgtataacacttcttgcggcgatggttcctggctcttcgatcaacaacgatctcgataacgaactggacgatggatcctacggtcattcagc

SEQ ID NO: 1998 - DNA, 158 bp, synthetic construct
  misc_feature 1..158: note = Synthetic nucleic acid
  source 1..158: mol_type = other DNA
cagacgacggccagtgtcgacatggctaagtcactgttcagggcgctggtcgccctaacacttcttgcggcgatggttcctggctcttcgatcctcgctgcacaacagctctgtaatgcgctttcacaggtagattcaggatcctacggtcattcagc

SEQ ID NO: 1999 - DNA, 158 bp, synthetic construct
  misc_feature 1..158: note = Synthetic nucleic acid
  source 1..158: mol_type = other DNA
cagacgacggccagtgtcgacatgtaccaggttgttgcgtctgatttagatggcacgttactttaacacttcttgcggcgatggttcctggctcttcgatcggtgccgcattatctgcgtaaactctatttatcgggtggatcctacggtcattcagc

SEQ ID NO: 2000 - DNA, 158 bp, synthetic construct
  misc_feature 1..158: note = Synthetic nucleic acid
  source 1..158: mol_type = other DNA
cagacgacggccagtgtcgacgtgacagaaccgttaaccgaaacccctgaactatccgaacacttcttgcggcgatggttcctggctcttcgatctaacaggagtgatgactatgagtcgtttagtcgtagtatcctcggatcctacggtcattcagc

SEQ ID NO: 2001 - DNA, 158 bp, synthetic construct
  misc_feature 1..158: note = Synthetic nucleic acid
  source 1..158: mol_type = other DNA
cagacgacggccagtgtcgacgtgcgaaaaaacacctatgccatgcgctatgttgccggaaacacttcttgcggcgatggttcctggctcttcgatccgctactcgttgaattcagtcccggcaagcctgataaatatggatcctacggtcattcagc

SEQ ID NO: 2002 - DNA, 158 bp, synthetic construct
  misc_feature 1..158: note = Synthetic nucleic acid
  source 1..158: mol_type = other DNA
cagacgacggccagtgtcgacatgattaagtggccctggaaagtacaagaatcagcacatcaaactaacacttcttgcggcgatggttcctggctcttcgatcatacagactcgttttcggcgacgaatgttcatagtggatcctacggtcattcagc

SEQ ID NO: 2003 - DNA, 158 bp, synthetic construct
  misc_feature 1..158: note = Synthetic nucleic acid
  source 1..158: mol_type = other DNA
cagacgacggccagtgtcgacatgcaggaatacacgaatcattccgataccacttttgcactgcgtaatataacacttcttgcggcgatggttcctggctcttcgatcggtgctgcacctgtgagttttgtttatgtaggatcctacggtcattcagc

SEQ ID NO: 2004 - DNA, 158 bp, synthetic construct
  misc_feature 1..158: note = Synthetic nucleic acid
  source 1..158: mol_type = other DNA
cagacgacggccagtgtcgacatggttgaattaaaagagccgcttgccacactttggcgtaacacttcttgcggcgatggttcctggctcttcgatcccgagcgtattaaagagcgaacacaacgcaaaggattacgtggatcctacggtcattcagc

SEQ ID NO: 2005 - DNA, 158 bp, synthetic construct
  misc_feature 1..158: note = Synthetic nucleic acid
  source 1..158: mol_type = other DNA
cagacgacggccagtgtcgacatgaaacagtatttagaactgatgcaaaaagtgctcgacgaaggcacaaacacttcttgcggcgatggttcctggctcttcgatcatccgggcattaaagcgccggtggctatcagcggatcctacggtcattcagc

SEQ ID NO: 2006 - DNA, 158 bp, synthetic construct
  misc_feature 1..158: note = Synthetic nucleic acid
  source 1..158: mol_type = other DNA
cagacgacggccagtgtcgacatgaaaccgaccaccatctccttactgcagaagtacaaacaggaaaaaaaaaacacttcttgcggcgatggttcctggctcttcgatcatccgggcgaagaacacagtttccattcaggatcctacggtcattcagc

SEQ ID NO: 2007 - DNA, 158 bp, synthetic construct
  misc_feature 1..158: note = Synthetic nucleic acid
  source 1..158: mol_type = other DNA
cagacgacggccagtgtcgacatgcactctgaacgcgcaccgtttttcctcaaactggcggcaacacttcttgcggcgatggttcctggctcttcgatcgcctggtggctaacccgcgaaggcgacaatggtcaagagggatcctacggtcattcagc

SEQ ID NO: 2008 - DNA, 158 bp, synthetic construct
  misc_feature 1..158: note = Synthetic nucleic acid
  source 1..158: mol_type = other DNA
cagacgacggccagtgtcgacatggatctgttgtaccgggtaaaaacgctttgggccgcaacacttcttgcggcgatggttcctggctcttcgatccacctgtatggagaagggaatttgccgcaaatgttgcgccatggatcctacggtcattcagc

SEQ ID NO: 2009 - DNA, 158 bp, synthetic construct
  misc_feature 1..158: note = Synthetic nucleic acid
  source 1..158: mol_type = other DNA
cagacgacggccagtgtcgacatggctatctcaatcaagaccccagaagatatcgaaaaaatgcgcgtaacacttcttgcggcgatggttcctggctcttcgatcaccatcccggcgataatctcgcacgacgaatggggatcctacggtcattcagc

SEQ ID NO: 2010 - DNA, 158 bp, synthetic construct
  misc_feature 1..158: note = Synthetic nucleic acid
  source 1..158: mol_type = other DNA
cagacgacggccagtgtcgacatgaatcaaatcgaccgtttgctcactattatgcagcgcaacacttcttgcggcgatggttcctggctcttcgatcaagtctggcaacaggtaaaacggcaggaaattgatctcgagggatcctacggtcattcagc

SEQ ID NO: 2011 - DNA, 158 bp, synthetic construct
  misc_feature 1..158: note = Synthetic nucleic acid
  source 1..158: mol_type = other DNA
cagacgacggccagtgtcgacatgagcagtaacttcagacatcaactattgagtctgtcgttactggttaacacttcttgcggcgatggttcctggctcttcgatcaacaggcacaaaaacgtctgaacgcgatgttaggatcctacggtcattcagc

SEQ ID NO: 2012 - DNA, 158 bp, synthetic construct
  misc_feature 1..158: note = Synthetic nucleic acid
  source 1..158: mol_type = other DNA
cagacgacggccagtgtcgacatgcccgtttttgctctgctcgcgcttgtcgcctaaacacttcttgcggcgatggttcctggctcttcgatcctggcctacttcggcagccgaattgtccagcagttaatcagctatggatcctacggtcattcagc

SEQ ID NO: 2013 - DNA, 158 bp, synthetic construct
  misc_feature 1..158: note = Synthetic nucleic acid
  source 1..158: mol_type = other DNA
cagacgacggccagtgtcgacatgcctgaaggcccggagatccgccgtgcagcggataaaacacttcttgcggcgatggttcctggctcttcgatctcatctcgcccgttttactggtgccctggctgccagcacatgggatcctacggtcattcagc

SEQ ID NO: 2014 - DNA, 158 bp, synthetic construct
  misc_feature 1..158: note = Synthetic nucleic acid
  source 1..158: mol_type = other DNA
cagacgacggccagtgtcgacatggcaacgccagtgaagaagtggttattgcgcgttgccaacacttcttgcggcgatggttcctggctcttcgatcgctggaacccggcttatcatttgaaggaggccacggtagtgggatcctacggtcattcagc

SEQ ID NO: 2015 - DNA, 158 bp, synthetic construct
  misc_feature 1..158: note = Synthetic nucleic acid
  source 1..158: mol_type = other DNA
cagacgacggccagtgtcgacatggctaacgcagatctggataaacagcctgattctgtatcttaacacttcttgcggcgatggttcctggctcttcgatcttctgcccaaatgggttatcacgactatccgttcggtggatcctacggtcattcagc

SEQ ID NO: 2016 - DNA, 158 bp, synthetic construct
  misc_feature 1..158: note = Synthetic nucleic acid
  source 1..158: mol_type = other DNA
cagacgacggccagtgtcgacatgggatctgaaatcagtaaaaaagatatcacccgtctgggctttaacacttcttgcggcgatggttcctggctcttcgatctctctattgtttgttccgcattcggcattttggagggatcctacggtcattcagc

SEQ ID NO: 2017 - DNA, 158 bp, synthetic construct
  misc_feature 1..158: note = Synthetic nucleic acid
  source 1..158: mol_type = other DNA
cagacgacggccagtgtcgacatgggccttatgaacgcatttgattcgcaaaccgaagattcttaacacttcttgcggcgatggttcctggctcttcgatcgcacgctttcggtcagaccaccaacaaaaagaaacgaggatcctacggtcattcagc

SEQ ID NO: 2018 - DNA, 158 bp, synthetic construct
  misc_feature 1..158: note = Synthetic nucleic acid
  source 1..158: mol_type = other DNA
cagacgacggccagtgtcgacatgggtaaactcacgggcaagacagcactgattacgggcgcattaacacttcttgcggcgatggttcctggctcttcgatcagcacactgccggagacggttagcgtcggtatctggggatcctacggtcattcagc

SEQ ID NO: 2019 - DNA, 158 bp, synthetic construct
  misc_feature 1..158: note = Synthetic nucleic acid
  source 1..158: mol_type = other DNA
cagacgacggccagtgtcgacatgaaaatcggcacacagaatcaggcgttctttccggaaaacattctaacacttcttgcggcgatggttcctggctcttcgatccgtgattcgttggcctggttgcgtacctgctgtggatcctacggtcattcagc

SEQ ID NO: 2020 - DNA, 158 bp, synthetic construct
  misc_feature 1..158: note = Synthetic nucleic acid
  source 1..158: mol_type = other DNA
cagacgacggccagtgtcgacatgatggaattcatcctcagtcatgtagaaaagggcgtgatgacactaaaacacttcttgcggcgatggttcctggctcttcgatctaaacgctcaccgcagttcacggggaaaggaggatcctacggtcattcagc

SEQ ID NO: 2021 - DNA, 158 bp, synthetic construct
  misc_feature 1..158: note = Synthetic nucleic acid
  source 1..158: mol_type = other DNA
cagacgacggccagtgtcgacatgcaaacgattatccgtgtcgagaagctcgccaaaaccttcaataacacttcttgcggcgatggttcctggctcttcgatcttaaccgcgtcgaagagaacgcgaaagctgcctctggatcctacggtcattcagc

SEQ ID NO: 2022 - DNA, 158 bp, synthetic construct
  misc_feature 1..158: note = Synthetic nucleic acid
  source 1..158: mol_type = other DNA
cagacgacggccagtgtcgacatgcaggccgaaatccttctcacccttaagctccaacaaaaattattcgaacacttcttgcggcgatggttcctggctcttcgatccgacagcgtgattatcgccacgctgtgcctgggatcctacggtcattcagc

SEQ ID NO: 2023 - DNA, 158 bp, synthetic construct
  misc_feature 1..158: note = Synthetic nucleic acid
  source 1..158: mol_type = other DNA
cagacgacggccagtgtcgacatggcctatcgttccgcaccgctctatgaagatgtcatctggaacacttcttgcggcgatggttcctggctcttcgatccggatgtgcagcaatgtggcgattgtacgctgaaaccgggatcctacggtcattcagc

SEQ ID NO: 2024 - DNA, 158 bp, synthetic construct
  misc_feature 1..158: note = Synthetic nucleic acid
  source 1..158: mol_type = other DNA
cagacgacggccagtgtcgacatgggttttctttccggtaagcgcattctggtaaccggtaacacttcttgcggcgatggttcctggctcttcgatcgtttcagcattgctgcaatgaacgaactcgaactgaaagaaggatcctacggtcattcagc

SEQ ID NO: 2025 - DNA, 158 bp, synthetic construct
  misc_feature 1..158: note = Synthetic nucleic acid
  source 1..158: mol_type = other DNA
cagacgacggccagtgtcgacatgtcttcaacacgtatgccagcattgtttttaggtcacggtagtcaacacttcttgcggcgatggttcctggctcttcgatccagcctgagtatgctgtcggtgcagataggcgttggatcctacggtcattcagc

SEQ ID NO: 2026 - DNA, 158 bp, synthetic construct
  misc_feature 1..158: note = Synthetic nucleic acid
  source 1..158: mol_type = other DNA
cagacgacggccagtgtcgacgtgattgataaatccgcctttgtgcatccaaccgccattgtggaaaacacttcttgcggcgatggttcctggctcttcgatctctttgcacgctcaacgcgcggtctgattcgtggcggatcctacggtcattcagc

SEQ ID NO: 2027 - DNA, 158 bp, synthetic construct
  misc_feature 1..158: note = Synthetic nucleic acid
  source 1..158: mol_type = other DNA
cagacgacggccagtgtcgacatgaaaaccctggcgacaatcggcgataactgcgtcgatatctacaacacttcttgcggcgatggttcctggctcttcgatccggcgaaaaccattcagtaccacggtgcctgggggggatcctacggtcattcagc

SEQ ID NO: 2028 - DNA, 158 bp, synthetic construct
  misc_feature 1..158: note = Synthetic nucleic acid
  source 1..158: mol_type = other DNA
cagacgacggccagtgtcgacatgaacccgtcgcaacatgctgaacagtttcagagccaaacacttcttgcggcgatggttcctggctcttcgatcgaaacctttaaaagcatggtcgatggctatcaccggcacggaggatcctacggtcattcagc

SEQ ID NO: 2029 - DNA, 158 bp, synthetic construct
  misc_feature 1..158: note = Synthetic nucleic acid
  source 1..158: mol_type = other DNA
cagacgacggccagtgtcgacatgagccttaccgaactaaccggtaacccgcggaacacttcttgcggcgatggttcctggctcttcgatctacaagacagccaaattgaaatcattcttccccaggaagacgcggggggatcctacggtcattcagc

SEQ ID NO: 2030 - DNA, 158 bp, synthetic construct
  misc_feature 1..158: note = Synthetic nucleic acid
  source 1..158: mol_type = other DNA
cagacgacggccagtgtcgacatgagtgaatcattacatctgacccgcaatggatcaattctggaaattacccttaacacttcttgcggcgatggttcctggctcttcgatcgcgatccggtgtggaaaggacgtggcggatcctacggtcattcagc

SEQ ID NO: 2031 - DNA, 158 bp, synthetic construct
  misc_feature 1..158: note = Synthetic nucleic acid
  source 1..158: mol_type = other DNA
cagacgacggccagtgtcgacatgattgaattattatttcccggttggttagccgggatcatgctaacacttcttgcggcgatggttcctggctcttcgatctttattctcagtatgatgaaaaagcaggccagcactggatcctacggtcattcagc

SEQ ID NO: 2032 - DNA, 158 bp, synthetic construct
  misc_feature 1..158: note = Synthetic nucleic acid
  source 1..158: mol_type = other DNA
cagacgacggccagtgtcgacatgcaggatcgcaattttgatgatattgcggaaaagttttcccgtaaaacacttcttgcggcgatggttcctggctcttcgatcgcgcgcaaaccgcagagcaaggataaagtaaaaggatcctacggtcattcagc

SEQ ID NO: 2033 - DNA, 158 bp, synthetic construct
  misc_feature 1..158: note = Synthetic nucleic acid
  source 1..158: mol_type = other DNA
cagacgacggccagtgtcgacatgtcaatcgaatctctcaatgcgttctcaatggattttttctccctaacacttcttgcggcgatggttcctggctcttcgatcttagtggttgatggcggttatttagtgcgcctcggatcctacggtcattcagc

SEQ ID NO: 2034 - DNA, 158 bp, synthetic construct
  misc_feature 1..158: note = Synthetic nucleic acid
  source 1..158: mol_type = other DNA
cagacgacggccagtgtcgacatgtcttatcagtatgttaacgttgtcactatcaacaaagtggcggtaacacttcttgcggcgatggttcctggctcttcgatcgaaaaacgtaaacctaatttcgttggtcatggatcctacggtcattcagccgc

SEQ ID NO: 2035 - DNA, 158 bp, synthetic construct
  misc_feature 1..158: note = Synthetic nucleic acid
  source 1..158: mol_type = other DNA
cagacgacggccagtgtcgacatgttgcaggtgacaagcgaacaatggctatcctgaacacttcttgcggcgatggttcctggctcttcgatctttaatttgctggctgatattattagtgaattgccattaataaacggatcctacggtcattcagc

SEQ ID NO: 2036 - DNA, 158 bp, synthetic construct
  misc_feature 1..158: note = Synthetic nucleic acid
  source 1..158: mol_type = other DNA
cagacgacggccagtgtcgacatgaaaaaactggtgctatcgctctctctggttctggcaacacttcttgcggcgatggttcctggctcttcgatcttagcgaaaaagtacttcgattttgatgtttatggtggctacggatcctacggtcattcagc

SEQ ID NO: 2037 - DNA, 158 bp, synthetic construct
  misc_feature 1..158: note = Synthetic nucleic acid
  source 1..158: mol_type = other DNA
cagacgacggccagtgtcgacatgaagaagtcgattctcgctctgtctttgttagtcggtctaacacttcttgcggcgatggttcctggctcttcgatcgcgaaaaagtatttcgactttaatgtctacggtgacgtaggatcctacggtcattcagc

SEQ ID NO: 2038 - DNA, 158 bp, synthetic construct
  misc_feature 1..158: note = Synthetic nucleic acid
  source 1..158: mol_type = other DNA
cagacgacggccagtgtcgacatgagccaacagagacctgaccgtatcaaacagatgctaacacttcttgcggcgatggttcctggctcttcgatccgagccggatgtcagttgtttttacctcattcaataaagtatggatcctacggtcattcagc

SEQ ID NO: 2039 - DNA, 158 bp, synthetic construct
  misc_feature 1..158: note = Synthetic nucleic acid
  source 1..158: mol_type = other DNA
cagacgacggccagtgtcgacatgatcagttcattatggatcgccaaaacgggccttgacgcaacacttcttgcggcgatggttcctggctcttcgatcaccaccgatcagatgctgcaaaaactgacgcaactcacgggatcctacggtcattcagc

SEQ ID NO: 2040 - DNA, 158 bp, synthetic construct
  misc_feature 1..158: note = Synthetic nucleic acid
  source 1..158: mol_type = other DNA
cagacgacggccagtgtcgacatgctggaaatactctatcaggatgaatggctggttgcggtaaataaaaacacttcttgcggcgatggttcctggctcttcgatccatcgggtcaggatggagagataagttccggatcctacggtcattcagccgc

SEQ ID NO: 2041 - DNA, 158 bp, synthetic construct
  misc_feature 1..158: note = Synthetic nucleic acid
  source 1..158: mol_type = other DNA
cagacgacggccagtgtcgacatgctgttaaatgcgctggcgtcgctcggacataaaggaacacttcttgcggcgatggttcctggctcttcgatcgggctggattttgtgctgaccgcattgatgtttgggaatcatggatcctacggtcattcagc

SEQ ID NO: 2042 - DNA, 158 bp, synthetic construct
  misc_feature 1..158: note = Synthetic nucleic acid
  source 1..158: mol_type = other DNA
cagacgacggccagtgtcgacatgttggaatcaagcaaagttcccgccctgacacggaacacttcttgcggcgatggttcctggctcttcgatcgtctgttgggatggaaaagtccctttgacttacaagcctcagccggatcctacggtcattcagc

SEQ ID NO: 2043 - DNA, 158 bp, synthetic construct
  misc_feature 1..158: note = Synthetic nucleic acid
  source 1..158: mol_type = other DNA
cagacgacggccagtgtcgacatgtttgatatcggcgttaatttgaccagttcgcaatttgcgaaaaacacttcttgcggcgatggttcctggctcttcgatcctaatgtcaaaacactgtttgggattgcgttttatggatcctacggtcattcagc

SEQ ID NO: 2044 - DNA, 158 bp, synthetic construct
  misc_feature 1..158: note = Synthetic nucleic acid
  source 1..158: mol_type = other DNA
cagacgacggccagtgtcgacatgaacattctgttagcgtttaaagccgaaccggatgccgaacacttcttgcggcgatggttcctggctcttcgatcgctatggcaggactatttacgccaaaggatgcagccactgggatcctacggtcattcagc

SEQ ID NO: 2045 - DNA, 158 bp, synthetic construct
  misc_feature 1..158: note = Synthetic nucleic acid
  source 1..158: mol_type = other DNA
cagacgacggccagtgtcgacatgaatcaggttgccgttgtcatcggtggtgggcaaaccttaaacacttcttgcggcgatggttcctggctcttcgatcagtcgatcaatgtcaccggcggtcaggtgatgttcaatggatcctacggtcattcagc

SEQ ID NO: 2046 - DNA, 158 bp, synthetic construct
  misc_feature 1..158: note = Synthetic nucleic acid
  source 1..158: mol_type = other DNA
cagacgacggccagtgtcgacatgactgatctgaaagcaagcagcctgcgtgcactgaaattgatggaaacacttcttgcggcgatggttcctggctcttcgatccacggcgacggtaagagcgccagcagctacctcggatcctacggtcattcagc

SEQ ID NO: 2047 - DNA, 158 bp, synthetic construct
  misc_feature 1..158: note = Synthetic nucleic acid
  source 1..158: mol_type = other DNA
cagacgacggccagtgtcgacatgattgaacaatttttcaggcccgactctgtcgaacaggcgctggaaaacacttcttgcggcgatggttcctggctcttcgatcactgccaacaggctggggaggaagccgtaagcggatcctacggtcattcagc

SEQ ID NO: 2048 - DNA, 158 bp, synthetic construct
  misc_feature 1..158: note = Synthetic nucleic acid
  source 1..158: mol_type = other DNA
cagacgacggccagtgtcgacatgctttttacactgaaaaaagtgattggcaatatgttgctgccacttccgaacacttcttgcggcgatggttcctggctcttcgatcgttcgtcaggcgagccacggcaagagtggggatcctacggtcattcagc

SEQ ID NO: 2049 - DNA, 158 bp, synthetic construct
  misc_feature 1..158: note = Synthetic nucleic acid
  source 1..158: mol_type = other DNA
cagacgacggccagtgtcgacatggcatttaagatctggcaaattggtttgcatttacaacagcaagaagcggtaaacacttcttgcggcgatggttcctggctcttcgatcggctggcgcttgggaaggcgtactttggatcctacggtcattcagc

SEQ ID NO: 2050 - DNA, 158 bp, synthetic construct
  misc_feature 1..158: note = Synthetic nucleic acid
  source 1..158: mol_type = other DNA
cagacgacggccagtgtcgacttgatttgccgttttatcgacacccactgccattttgatttaacacttcttgcggcgatggttcctggctcttcgatcttgcttaataacacgtatacgttgtttaacgtgccgttcggatcctacggtcattcagc

SEQ ID NO: 2051 - DNA, 158 bp, synthetic construct
  misc_feature 1..158: note = Synthetic nucleic acid
  source 1..158: mol_type = other DNA
cagacgacggccagtgtcgacatgatgaatccattaattatcaaactgggcggcgtactgctggataaacacttcttgcggcgatggttcctggctcttcgatccggtatgccgatgggtacgcggattttagctcctggatcctacggtcattcagc

SEQ ID NO: 2052 - DNA, 158 bp, synthetic construct
  misc_feature 1..158: note = Synthetic nucleic acid
  source 1..158: mol_type = other DNA
cagacgacggccagtgtcgacatgattgttttacccagacgcctgtcagacgaggttgccaacacttcttgcggcgatggttcctggctcttcgatcccggtgagcataatgagcattcgagggagaaaaacgcatgcggatcctacggtcattcagc

SEQ ID NO: 2053 - DNA, 158 bp, synthetic construct
  misc_feature 1..158: note = Synthetic nucleic acid
  source 1..158: mol_type = other DNA
cagacgacggccagtgtcgacatgcctcgttttgcagctaatttatccatgatgttcaccgaagtgccttttattaacacttcttgcggcgatggttcctggctcttcgatcttggctggtttgacgcctggcgctacggatcctacggtcattcagc

SEQ ID NO: 2054 - DNA, 158 bp, synthetic construct
  misc_feature 1..158: note = Synthetic nucleic acid
  source 1..158: mol_type = other DNA
cagacgacggccagtgtcgacatgcgaaagatttttcttccgttgttactggtggcgctttcgaacacttcttgcggcgatggttcctggctcttcgatcctggcgagctgacgctggtgaaaagttttgactggaatggatcctacggtcattcagc

SEQ ID NO: 2055 - DNA, 158 bp, synthetic construct
  misc_feature 1..158: note = Synthetic nucleic acid
  source 1..158: mol_type = other DNA
cagacgacggccagtgtcgacatgctgattcttatttcacctgcgaaaacgcttgattaccaaagccaacacttcttgcggcgatggttcctggctcttcgatccgaactggtgtttaaacgctacgagcagcgtattggatcctacggtcattcagc

SEQ ID NO: 2056 - DNA, 158 bp, synthetic construct
  misc_feature 1..158: note = Synthetic nucleic acid
  source 1..158: mol_type = other DNA
cagacgacggccagtgtcgacatgctggcaaaacgcataatcccatgtctcgacgttcgtgataacacttcttgcggcgatggttcctggctcttcgatcacctggcaacacagggcgtggagatcaggatatgtgagggatcctacggtcattcagc

SEQ ID NO: 2057 - DNA, 158 bp, synthetic construct
  misc_feature 1..158: note = Synthetic nucleic acid
  source 1..158: mol_type = other DNA
cagacgacggccagtgtcgacatggaaatcactgaaccacgccgtttgtatcaacaacttgccgaacacttcttgcggcgatggttcctggctcttcgatcggtgcatctcgatacagccaccagcggcagtaaaaccggatcctacggtcattcagc

SEQ ID NO: 2058 - DNA, 158 bp, synthetic construct
  misc_feature 1..158: note = Synthetic nucleic acid
  source 1..158: mol_type = other DNA
cagacgacggccagtgtcgacatgtccgaaacaaaaaacgaacttgaagacctgctggaaaaagaacacttcttgcggcgatggttcctggctcttcgatcttttttgcgtgactttaaacagaatcggataatcatcggatcctacggtcattcagc

SEQ ID NO: 2059 - DNA, 158 bp, synthetic construct
  misc_feature 1..158: note = Synthetic nucleic acid
  source 1..158: mol_type = other DNA
cagacgacggccagtgtcgacatgtctgtagaagatactcaaccgcttatcacgcatctgattgagctaacacttcttgcggcgatggttcctggctcttcgatcgctgaagcagaaagcgaaaaaactgaagaagggggatcctacggtcattcagc

SEQ ID NO: 2060 - DNA, 158 bp, synthetic construct
  misc_feature 1..158: note = Synthetic nucleic acid
  source 1..158: mol_type = other DNA
cagacgacggccagtgtcgacatgaaacctcgtcagcgtcaggccgccattctaacacttcttgcggcgatggttcctggctcttcgatcgaagagaaagggatcgatgtgatcataaccggagagagcaatgagaggggatcctacggtcattcagc

SEQ ID NO: 2061 - DNA, 158 bp, synthetic construct
  misc_feature 1..158: note = Synthetic nucleic acid
  source 1..158: mol_type = other DNA
cagacgacggccagtgtcgacatgagtatggttgaaactgccccgagtaaaattcaggttcgtaatttaacacttcttgcggcgatggttcctggctcttcgatcacagaagactacatcaccggtcgttacggtattggatcctacggtcattcagc

SEQ ID NO: 2062 - DNA, 158 bp, synthetic construct
  misc_feature 1..158: note = Synthetic nucleic acid
  source 1..158: mol_type = other DNA
cagacgacggccagtgtcgacatgataaaacggacgttattagcggcggccatttttagcgcattaacacttcttgcggcgatggttcctggctcttcgatcctgcaacttgcagcccgtctgacctggaaattcactggatcctacggtcattcagc

SEQ ID NO: 2063 - DNA, 158 bp, synthetic construct
  misc_feature 1..158: note = Synthetic nucleic acid
  source 1..158: mol_type = other DNA
cagacgacggccagtgtcgacatggatcgtataattgaaaaattagatcacggctggtgggtcgtcaaacacttcttgcggcgatggttcctggctcttcgatctacggtggcgatgtgtcgggcagagtatgagcgtggatcctacggtcattcagc

SEQ ID NO: 2064 - DNA, 158 bp, synthetic construct
  misc_feature 1..158: note = Synthetic nucleic acid
  source 1..158: mol_type = other DNA
cagacgacggccagtgtcgacatggctcgtaaatggttgaacttgtttgccggggaacacttcttgcggcgatggttcctggctcttcgatcgcaggcagcggaaatctttaaacgttacggatttacaatcaagccgggatcctacggtcattcagc

SEQ ID NO: 2065 - DNA, 158 bp, synthetic construct
  misc_feature 1..158: note = Synthetic nucleic acid
  source 1..158: mol_type = other DNA
cagacgacggccagtgtcgacatgtcagtacctctcattctgaccatactggcgggggcaaacacttcttgcggcgatggttcctggctcttcgatcgattcagtttagtgctgctacaaacggcgggaattggttgtggatcctacggtcattcagc

SEQ ID NO: 2066 - DNA, 158 bp, synthetic construct
  misc_feature 1..158: note = Synthetic nucleic acid
  source 1..158: mol_type = other DNA
cagacgacggccagtgtcgacatgtccgagaataaattaaacgttatcgatttgcacaaacgctacggaacacttcttgcggcgatggttcctggctcttcgatcctgcaacggttccttaagggatcgctgaaatccggatcctacggtcattcagc

SEQ ID NO: 2067 - DNA, 158 bp, synthetic construct
  misc_feature 1..158: note = Synthetic nucleic acid
  source 1..158: mol_type = other DNA
cagacgacggccagtgtcgacatgaagattattacttgctataagtgcgtgcctgatgaacaggatattgcaacacttcttgcggcgatggttcctggctcttcgatctttgctgaaaatcttcgcaaagtcatttacggatcctacggtcattcagc

SEQ ID NO: 2068 - DNA, 158 bp, synthetic construct
  misc_feature 1..158: note = Synthetic nucleic acid
  source 1..158: mol_type = other DNA
cagacgacggccagtgtcgacatgaataacatctggtggcagaccaaaggtcaggggaatgttcatcttaacacttcttgcggcgatggttcctggctcttcgatcacctgctggtggcgttgaagcagagggtgaagggatcctacggtcattcagc

SEQ ID NO: 2069 - DNA, 158 bp, synthetic construct
  misc_feature 1..158: note = Synthetic nucleic acid
  source 1..158: mol_type = other DNA
cagacgacggccagtgtcgacatgaataacgatgttttcccgaataaattcaaagccgcactggctaacacttcttgcggcgatggttcctggctcttcgatcccactcagaaactggctgatacctttaaaaaaaatggatcctacggtcattcagc

SEQ ID NO: 2070 - DNA, 158 bp, synthetic construct
  misc_feature 1..158: note = Synthetic nucleic acid
  source 1..158: mol_type = other DNA
cagacgacggccagtgtcgacatgatgcatctttactgggtggcgctaaaaagcatctgggcgaaaaacacttcttgcggcgatggttcctggctcttcgatccgctgatccaacgtggacgtggtttgcgtagcccaggatcctacggtcattcagc

SEQ ID NO: 2071 - DNA, 158 bp, synthetic construct
  misc_feature 1..158: note = Synthetic nucleic acid
  source 1..158: mol_type = other DNA
cagacgacggccagtgtcgacatgcaaactgagcaacagcgagccgtaacacggctttgtatccaaacacttcttgcggcgatggttcctggctcttcgatcgcactgacgatttgggggctacgcggatgggtgaagggatcctacggtcattcagc

SEQ ID NO: 2072 - DNA, 158 bp, synthetic construct
  misc_feature 1..158: note = Synthetic nucleic acid
  source 1..158: mol_type = other DNA
cagacgacggccagtgtcgacatgttacgtattgcggacaaaacgtttgattcacatctgtttaccggcaaacacttcttgcggcgatggttcctggctcttcgatcgctgaccggatttctggaggcatcggcatctggatcctacggtcattcagc

SEQ ID NO: 2073 - DNA, 158 bp, synthetic construct
  misc_feature 1..158: note = Synthetic nucleic acid
  source 1..158: mol_type = other DNA
cagacgacggccagtgtcgacgtgaaaagtatagttgacccatcggcattagtcattgatttaggtgcgaacacttcttgcggcgatggttcctggctcttcgatcatcctgcaatcgcgcgcagatttgtgaattttggatcctacggtcattcagc

SEQ ID NO: 2074 - DNA, 158 bp, synthetic construct
  misc_feature 1..158: note = Synthetic nucleic acid
  source 1..158: mol_type = other DNA
cagacgacggccagtgtcgacgtgcctggtttgaagattacgcttttgcagcaaccactggtgtaacacttcttgcggcgatggttcctggctcttcgatcggcatggcaggatgcggatgagtttaggttgtggctgggatcctacggtcattcagc

SEQ ID NO: 2075 - DNA, 158 bp, synthetic construct
  misc_feature 1..158: note = Synthetic nucleic acid
  source 1..158: mol_type = other DNA
cagacgacggccagtgtcgacatgaatactgctcgtctgaaccagggcacgccattgttaacacttcttgcggcgatggttcctggctcttcgatccaacgtggtgaatctgaaactcgcctgagaaaacaggggaacggatcctacggtcattcagc

SEQ ID NO: 2076 - DNA, 158 bp, synthetic construct
  misc_feature 1..158: note = Synthetic nucleic acid
  source 1..158: mol_type = other DNA
cagacgacggccagtgtcgacatgactttacgaactgaaaatctgacggtcagttacgggacagacaaaacacttcttgcggcgatggttcctggctcttcgatcgtatctggcaggccgatgtgcctaatgagggatggatcctacggtcattcagc

SEQ ID NO: 2077 - DNA, 158 bp, synthetic construct
  misc_feature 1..158: note = Synthetic nucleic acid
  source 1..158: mol_type = other DNA
cagacgacggccagtgtcgacatgagcaatttattaggcccccgtgacgccaacggcattaacacttcttgcggcgatggttcctggctcttcgatcgccatctgaatcatgttgttgaagaggcgcgtatccgaatcggatcctacggtcattcagc

SEQ ID NO: 2078 - DNA, 158 bp, synthetic construct
  misc_feature 1..158: note = Synthetic nucleic acid
  source 1..158: mol_type = other DNA
cagacgacggccagtgtcgacatgagcgaactgatcgtcagccgtcagcaacgagtattaacacttcttgcggcgatggttcctggctcttcgatcgctttcttacaaaaacgcacgcccgactttaaaggacgctgtggatcctacggtcattcagc

SEQ ID NO: 2079 - DNA, 158 bp, synthetic construct
  misc_feature 1..158: note = Synthetic nucleic acid
  source 1..158: mol_type = other DNA
cagacgacggccagtgtcgacatgagtcagccattattatctgttaacggcctgatgatgcgcttcaacacttcttgcggcgatggttcctggctcttcgatccggacgtgatccgtgcctatttaggtgaggcatttggatcctacggtcattcagc

SEQ ID NO: 2080 - DNA, 158 bp, synthetic construct
  misc_feature 1..158: note = Synthetic nucleic acid
  source 1..158: mol_type = other DNA
cagacgacggccagtgtcgacatgataaggcaggttatccagcgaataagcaaccctgaagcaaaacacttcttgcggcgatggttcctggctcttcgatcgatagaaacgctgaatacggcggttctggcgctagacggatcctacggtcattcagc

SEQ ID NO: 2081 - DNA, 158 bp, synthetic construct
  misc_feature 1..158: note = Synthetic nucleic acid
  source 1..158: mol_type = other DNA
cagacgacggccagtgtcgacatgcgacatcctttagtgatgggtaactggaaactgaacggaacacttcttgcggcgatggttcctggctcttcgatcgtaatcgttaaagctgcagaagcggctaaacaggctatgggatcctacggtcattcagc

SEQ ID NO: 2082 - DNA, 158 bp, synthetic construct
  misc_feature 1..158: note = Synthetic nucleic acid
  source 1..158: mol_type = other DNA
cagacgacggccagtgtcgacatgctgcaaatctctcatctttacgccgattatggcggcaaaccgaacacttcttgcggcgatggttcctggctcttcgatcgccgcgtatttgagcaacgggaggcgttctcaatgggatcctacggtcattcagc

SEQ ID NO: 2083 - DNA, 158 bp, synthetic construct
  misc_feature 1..158: note = Synthetic nucleic acid
  source 1..158: mol_type = other DNA
cagacgacggccagtgtcgacatgtgcgaattgctcgggatgagcgccaacgtccctaccaacacttcttgcggcgatggttcctggctcttcgatcgcgaatggcgcttattttgcctcggggagcgtgtagttaaaggatcctacggtcattcagc

SEQ ID NO: 2084 - DNA, 158 bp, synthetic construct
  misc_feature 1..158: note = Synthetic nucleic acid
  source 1..158: mol_type = other DNA
cagacgacggccagtgtcgacatgtggattggcataattagcctgtttcctgaaatgttccgcgaacacttcttgcggcgatggttcctggctcttcgatccgcacaacagcaacataaacatgatgggatggcgagcggatcctacggtcattcagc

SEQ ID NO: 2085 - DNA, 158 bp, synthetic construct
  misc_feature 1..158: note = Synthetic nucleic acid
  source 1..158: mol_type = other DNA
cagacgacggccagtgtcgacgtggcatattcgattggcattgattccggctcaaccgccaccaaaaacacttcttgcggcgatggttcctggctcttcgatccggtaattggtcaacgagtgaggacacgccgaagtggatcctacggtcattcagc

SEQ ID NO: 2086 - DNA, 158 bp, synthetic construct
  misc_feature 1..158: note = Synthetic nucleic acid
  source 1..158: mol_type = other DNA
cagacgacggccagtgtcgacgtgtttaattctgacaacctgagactcgacggaaaatgcgccatcataacacttcttgcggcgatggttcctggctcttcgatcgtctccggtggtggggtacaggagctcaatttaggatcctacggtcattcagc

SEQ ID NO: 2087 - DNA, 158 bp, synthetic construct
  misc_feature 1..158: note = Synthetic nucleic acid
  source 1..158: mol_type = other DNA
cagacgacggccagtgtcgacttgatacccgtagagcgtcgccaaatcatccttgagataacacttcttgcggcgatggttcctggctcttcgatcgtgaagcaggatctctctttgctggtagcgaaaaatgaatacggatcctacggtcattcagc

SEQ ID NO: 2088 - DNA, 158 bp, synthetic construct
  misc_feature 1..158: note = Synthetic nucleic acid
  source 1..158: mol_type = other DNA
cagacgacggccagtgtcgacatgaaaataataacctgctttaagctggtgcctgaagaacaggacattaacacttcttgcggcgatggttcctggctcttcgatctggcggaacatctgaagaaagccctgaacaaaggatcctacggtcattcagc

SEQ ID NO: 2089 - DNA, 158 bp, synthetic construct
  misc_feature 1..158: note = Synthetic nucleic acid
  source 1..158: mol_type = other DNA
cagacgacggccagtgtcgacatgaaagatgaacgtcgccctatttgcgaagtggttgcagagagtatcgaaaacacttcttgcggcgatggttcctggctcttcgatccggtgccgctggagatgaacctgagtcagggatcctacggtcattcagc

SEQ ID NO: 2090 - DNA, 158 bp, synthetic construct
  misc_feature 1..158: note = Synthetic nucleic acid
  source 1..158: mol_type = other DNA
cagacgacggccagtgtcgacatgaaattgaatatccgcgcgcaaactgcacaaaaccagaacacttcttgcggcgatggttcctggctcttcgatcatgcggtattacgcgctatccgtcgctatctcaatgattcgggatcctacggtcattcagc

SEQ ID NO: 2091 - DNA, 158 bp, synthetic construct
  misc_feature 1..158: note = Synthetic nucleic acid
  source 1..158: mol_type = other DNA
cagacgacggccagtgtcgacatgaacgatctattttcactggcaggaaaaaatatcttgattaccggttcagaacacttcttgcggcgatggttcctggctcttcgatctgatggcggcatgttagtggctgttaaaggatcctacggtcattcagc

SEQ ID NO: 2092 - DNA, 158 bp, synthetic construct
  misc_feature 1..158: note = Synthetic nucleic acid
  source 1..158: mol_type = other DNA
cagacgacggccagtgtcgacatgaagaatactaaattactgctggcgattgcgacctctgcagaacacttcttgcggcgatggttcctggctcttcgatcgcaacacatccgtgatcgtatcgcctctggtaaggtcggatcctacggtcattcagc

SEQ ID NO: 2093 - DNA, 158 bp, synthetic construct
  misc_feature 1..158: note = Synthetic nucleic acid
  source 1..158: mol_type = other DNA
cagacgacggccagtgtcgacatgaataacaccccccgctacccgcagcgcgttcgcaataacacttcttgcggcgatggttcctggctcttcgatccacagcgggtacgtgcagcggcttactggcacgcaaagaccggatcctacggtcattcagc

SEQ ID NO: 2094 - DNA, 158 bp, synthetic construct
  misc_feature 1..158: note = Synthetic nucleic acid
  source 1..158: mol_type = other DNA
cagacgacggccagtgtcgacatgcaagcattgctggaacactttattacccaatccaccgtaacacttcttgcggcgatggttcctggctcttcgatcgtgtatatcgatattttgcgtaaagtggttggggtttcgggatcctacggtcattcagc

SEQ ID NO: 2095 - DNA, 158 bp, synthetic construct
  misc_feature 1..158: note = Synthetic nucleic acid
  source 1..158: mol_type = other DNA
cagacgacggccagtgtcgacatgccgcaacagattgaactacgtaatatcgcgctacaggccaacacttcttgcggcgatggttcctggctcttcgatcctcatctcgccctctacggtatggagctggcatcatacggatcctacggtcattcagc

SEQ ID NO: 2096 - DNA, 158 bp, synthetic construct
  misc_feature 1..158: note = Synthetic nucleic acid
  source 1..158: mol_type = other DNA
cagacgacggccagtgtcgacatgcgttcgattgccagacgtaccgcagtgggaaacacttcttgcggcgatggttcctggctcttcgatcctgcggaagaaaatcgcgaaatagcgcaacgagaacaagaaagtctcggatcctacggtcattcagc

SEQ ID NO: 2097 - DNA, 158 bp, synthetic construct
  misc_feature 1..158: note = Synthetic nucleic acid
  source 1..158: mol_type = other DNA
cagacgacggccagtgtcgacatggaaaatataatgaacaatccggttatcggtgtcgtaatgtgcaggaaaacacttcttgcggcgatggttcctggctcttcgatccaccatatcgctgaaaaacagcgactcatgggatcctacggtcattcagc

SEQ ID NO: 2098 - DNA, 158 bp, synthetic construct
  misc_feature 1..158: note = Synthetic nucleic acid
  source 1..158: mol_type = other DNA
cagacgacggccagtgtcgacatggcctacagcaaaatccgccaaccaaaactctccgatgtaacacttcttgcggcgatggttcctggctcttcgatcgagcgttctctgcgtcgtctggagcaacgaaagaatctaggatcctacggtcattcagc

SEQ ID NO: 2099 - DNA, 158 bp, synthetic construct
  misc_feature 1..158: note = Synthetic nucleic acid
  source 1..158: mol_type = other DNA
cagacgacggccagtgtcgacatggcgcatcagctactcattggtaaaggaatgatcaccttgaataacacttcttgcggcgatggttcctggctcttcgatcttgtcaccatgatttccgtcgagcggaaaggtatcggatcctacggtcattcagc

SEQ ID NO: 2100 - DNA, 158 bp, synthetic construct
  misc_feature 1..158: note = Synthetic nucleic acid
  source 1..158: mol_type = other DNA
cagacgacggccagtgtcgacatgtttttcaaaaagaacctcacaacagctgctatttgtgcagcaaacacttcttgcggcgatggttcctggctcttcgatcatggtaacgtcactatcagcgttcagtatttaagcggatcctacggtcattcagc

SEQ ID NO: 2101 - DNA, 158 bp, synthetic construct
  misc_feature 1..158: note = Synthetic nucleic acid
  source 1..158: mol_type = other DNA
cagacgacggccagtgtcgacatgaggatttgcagcgaccaaccttgtattgttttattgactgaaaaaaacacttcttgcggcgatggttcctggctcttcgatcttagtcagcacagagaacgcactgtcgccattggatcctacggtcattcagc

SEQ ID NO: 2102 - DNA, 158 bp, synthetic construct
  misc_feature 1..158: note = Synthetic nucleic acid
  source 1..158: mol_type = other DNA
cagacgacggccagtgtcgacatgattttaagtgcattttctctcgaaggtaaagttgcggtcgtcactggttgtaacacttcttgcggcgatggttcctggctcttcgatctggatggcggttggctggcgcgtacaggatcctacggtcattcagc

SEQ ID NO: 2103 - DNA, 158 bp, synthetic construct
  misc_feature 1..158: note = Synthetic nucleic acid
  source 1..158: mol_type = other DNA
cagacgacggccagtgtcgacatgcaattgagcagcagtgaaccttgcgtggtgataacacttcttgcggcgatggttcctggctcttcgatcccgttgaattatctcgccaaacagcgacaaaaagtgatgtggtatggatcctacggtcattcagc

SEQ ID NO: 2104 - DNA, 158 bp, synthetic construct
  misc_feature 1..158: note = Synthetic nucleic acid
  source 1..158: mol_type = other DNA
cagacgacggccagtgtcgacatgcccgatcaaacacaacaattttcgttcaaggtgctaacacttcttgcggcgatggttcctggctcttcgatcctttctgatcatgcccctttaagtgcggagattcatttatgtggatcctacggtcattcagc

SEQ ID NO: 2105 - DNA, 158 bp, synthetic construct
  misc_feature 1..158: note = Synthetic nucleic acid
  source 1..158: mol_type = other DNA
cagacgacggccagtgtcgacatgcgcatattgctgagtaatgatgacggggtacatgcacccaacacttcttgcggcgatggttcctggctcttcgatcactggttaaacagcgtgggagttggcacgcaatggcccggatcctacggtcattcagc

SEQ ID NO: 2106 - DNA, 158 bp, synthetic construct
  misc_feature 1..158: note = Synthetic nucleic acid
  source 1..158: mol_type = other DNA
cagacgacggccagtgtcgacatggcacaggttgcgattattaccgcctccgattcgggaacacttcttgcggcgatggttcctggctcttcgatcggcggctttatgttggcgaatccacagttcaacccagaagacggatcctacggtcattcagc

SEQ ID NO: 2107 - DNA, 158 bp, synthetic construct
  misc_feature 1..158: note = Synthetic nucleic acid
  source 1..158: mol_type = other DNA
cagacgacggccagtgtcgacatggtttcatcattcacatctgccccacgcagcggtttttactattttaacacttcttgcggcgatggttcctggctcttcgatcgctatcgcgataaacacgcgatgtggcggataggatcctacggtcattcagc

SEQ ID NO: 2108 - DNA, 158 bp, synthetic construct
  misc_feature 1..158: note = Synthetic nucleic acid
  source 1..158: mol_type = other DNA
cagacgacggccagtgtcgacatgtccaagtctgatgtttttcatctcggcctcactaaaaacgatttacaaggaacacttcttgcggcgatggttcctggctcttcgatcgtggaagcggcgcgtcgtctgctgtggggatcctacggtcattcagc

SEQ ID NO: 2109 - DNA, 158 bp, synthetic construct
  misc_feature 1..158: note = Synthetic nucleic acid
  source 1..158: mol_type = other DNA
cagacgacggccagtgtcgacatgtcgctcgtttgttctgttatatttattcatcatgccttcaacgctaaaacacttcttgcggcgatggttcctggctcttcgatcggcaacacgatgaatgctttagctattacgggatcctacggtcattcagc

SEQ ID NO: 2110 - DNA, 158 bp, synthetic construct
  misc_feature 1..158: note = Synthetic nucleic acid
  source 1..158: mol_type = other DNA
cagacgacggccagtgtcgacgtgagctggcgtctggtctatgcatcaaccgttggaacgtaacacttcttgcggcgatggttcctggctcttcgatctgatgataaaacgttggcactggcgctgtgggcagaggagggatcctacggtcattcagc

SEQ ID NO: 2111 - DNA, 158 bp, synthetic construct
  misc_feature 1..158: note = Synthetic nucleic acid
  source 1..158: mol_type = other DNA
cagacgacggccagtgtcgacgtgatgttgtctgctactcaaccacttagcgaaaaattgccagcgcatgaacacttcttgcggcgatggttcctggctcttcgatccggcaccgagcccggtgatgaaacagccactggatcctacggtcattcagc

SEQ ID NO: 2112 - DNA, 158 bp, synthetic construct
  misc_feature 1..158: note = Synthetic nucleic acid
  source 1..158: mol_type = other DNA
cagacgacggccagtgtcgacatgaaaaccgtaactgtaaaagatctcgtcattggtacgggcaacacttcttgcggcgatggttcctggctcttcgatcatttgcgcacggtattaactattttacaccaggcacgtggatcctacggtcattcagc

SEQ ID NO: 2113 - DNA, 158 bp, synthetic construct
  misc_feature 1..158: note = Synthetic nucleic acid
  source 1..158: mol_type = other DNA
cagacgacggccagtgtcgacatgaaaattcgcgccttattggtagcaatgagcgtggcaacaacacttcttgcggcgatggttcctggctcttcgatccatattcgcgatcgcatgagcgcggatgggattaaggacggatcctacggtcattcagc

SEQ ID NO: 2114 - DNA, 158 bp, synthetic construct
  misc_feature 1..158: note = Synthetic nucleic acid
  source 1..158: mol_type = other DNA
cagacgacggccagtgtcgacatgaagcttttgaagacagttcctgccatcgttatgttggcgggaacacttcttgcggcgatggttcctggctcttcgatccgtcggacaaccttatcgctgggctacagcatgattggatcctacggtcattcagc

SEQ ID NO: 2115 - DNA, 158 bp, synthetic construct
  misc_feature 1..158: note = Synthetic nucleic acid
  source 1..158: mol_type = other DNA
cagacgacggccagtgtcgacatgaataagtttgaagatattcgcggcgtcgcttttgatcttgataacacttcttgcggcgatggttcctggctcttcgatccgcatagcgaaaatcaggaatcgaaaaatgacaggggatcctacggtcattcagc

SEQ ID NO: 2116 - DNA, 158 bp, synthetic construct
  misc_feature 1..158: note = Synthetic nucleic acid
  source 1..158: mol_type = other DNA
cagacgacggccagtgtcgacatgaatcaaccgttactttcggtcaataacctgacccacctttacaacacttcttgcggcgatggttcctggctcttcgatccacagctgctggtgtcatcggttttgcagaattgcggatcctacggtcattcagc

SEQ ID NO: 2117 - DNA, 158 bp, synthetic construct
  misc_feature 1..158: note = Synthetic nucleic acid
  source 1..158: mol_type = other DNA
cagacgacggccagtgtcgacatgagccaaattttactgcaacctgctaacgcgatgattacgaacacttcttgcggcgatggttcctggctcttcgatcagcgtacgagggcatttttatcgcaggtaatccatgagggatcctacggtcattcagc

SEQ ID NO: 2118 - DNA, 158 bp, synthetic construct
  misc_feature 1..158: note = Synthetic nucleic acid
  source 1..158: mol_type = other DNA
cagacgacggccagtgtcgacatgagcctgaccctcacgctcaccggcaccggcaacacttcttgcggcgatggttcctggctcttcgatccagggtttgaggtggggtttgatgggatggagattggggtggcgcccggatcctacggtcattcagc

SEQ ID NO: 2119 - DNA, 158 bp, synthetic construct
  misc_feature 1..158: note = Synthetic nucleic acid
  source 1..158: mol_type = other DNA
cagacgacggccagtgtcgacatgagtccagtgcttacacaacatgtcagccagcccatcaaacacttcttgcggcgatggttcctggctcttcgatctcagcaactctttcgcgtactccgggggttacatgacataggatcctacggtcattcagc

SEQ ID NO: 2120 - DNA, 158 bp, synthetic construct
  misc_feature 1..158: note = Synthetic nucleic acid
  source 1..158: mol_type = other DNA
cagacgacggccagtgtcgacatgatcctgcacgcgcaggcaaaacacggaaaaccaggtttaaacacttcttgcggcgatggttcctggctcttcgatcgcgtaatcgcaagtctggcgcagatcttgcgtttcatcggatcctacggtcattcagc

SEQ ID NO: 2121 - DNA, 158 bp, synthetic construct
  misc_feature 1..158: note = Synthetic nucleic acid
  source 1..158: mol_type = other DNA
cagacgacggccagtgtcgacatgcattaccagccaaaacaagatttactcaatgatcgcattatcctggtaacacttcttgcggcgatggttcctggctcttcgatcccgggccgtaaaccaggaatttcccaaagcggatcctacggtcattcagc

SEQ ID NO: 2122 - DNA, 158 bp, synthetic construct
  misc_feature 1..158: note = Synthetic nucleic acid
  source 1..158: mol_type = other DNA
cagacgacggccagtgtcgacatgccgattattcagtctgttgaacgtgcgttgcagatcctcgacctgttcaacgaaacacttcttgcggcgatggttcctggctcttcgatccgcgcgctgggctacccggccccgggatcctacggtcattcagc

SEQ ID NO: 2123 - DNA, 158 bp, synthetic construct
  misc_feature 1..158: note = Synthetic nucleic acid
  source 1..158: mol_type = other DNA
cagacgacggccagtgtcgacatggatgcactacaaactcaaactgttaatagtacaaccgcgccaacacttcttgcggcgatggttcctggctcttcgatcgttgccatcgtttctgaccgccgaagtttaacttacggatcctacggtcattcagc

SEQ ID NO: 2124 - DNA, 158 bp, synthetic construct
  misc_feature 1..158: note = Synthetic nucleic acid
  source 1..158: mol_type = other DNA
cagacgacggccagtgtcgacatgtctgactggaacccctctttatatctacacttttccgctgaacaacacttcttgcggcgatggttcctggctcttcgatcgcgtctgtttattgttgcccggcgtatggagcggggatcctacggtcattcagc

SEQ ID NO: 2125 - DNA, 158 bp, synthetic construct
  misc_feature 1..158: note = Synthetic nucleic acid
  source 1..158: mol_type = other DNA
cagacgacggccagtgtcgacgtggcggcaaaagacaggattcaggcaattaagcaaataacacttcttgcggcgatggttcctggctcttcgatcatagcattttgcaaagacaataatatccagctggtgtggttgggatcctacggtcattcagc

SEQ ID NO: 2126 - DNA, 158 bp, synthetic construct
  misc_feature 1..158: note = Synthetic nucleic acid
  source 1..158: mol_type = other DNA
cagacgacggccagtgtcgacatgaaaaaagcgggtcttctttttttggtgatgatagttatcgccgttaacacttcttgcggcgatggttcctggctcttcgatcttcaggatcatcagtgtgagattttgcgtagaggatcctacggtcattcagc

SEQ ID NO: 2127 - DNA, 158 bp, synthetic construct
  misc_feature 1..158: note = Synthetic nucleic acid
  source 1..158: mol_type = other DNA
cagacgacggccagtgtcgacatgaagcttcgcctgtcggcgcttgctctgggaaaacacttcttgcggcgatggttcctggctcttcgatccgcacaagcgattcaggatgatttaaaagatattgattctgaatatggatcctacggtcattcagc

SEQ ID NO: 2128 - DNA, 158 bp, synthetic construct
  misc_feature 1..158: note = Synthetic nucleic acid
  source 1..158: mol_type = other DNA
cagacgacggccagtgtcgacatgaatgaccgtgactttatgcgttatagccgccaaatcctgctaacacttcttgcggcgatggttcctggctcttcgatcccggtatgcggaggaagcaatgcagatcctgttcatggatcctacggtcattcagc

SEQ ID NO: 2129 - DNA, 158 bp, synthetic construct
  misc_feature 1..158: note = Synthetic nucleic acid
  source 1..158: mol_type = other DNA
cagacgacggccagtgtcgacatgacaagtctggtttccctggaaaatgtctcggtttcttttggaacacttcttgcggcgatggttcctggctcttcgatccgaattgttttgcgtcggggaaatgatcgctcatcaggatcctacggtcattcagc

SEQ ID NO: 2130 - DNA, 158 bp, synthetic construct
  misc_feature 1..158: note = Synthetic nucleic acid
  source 1..158: mol_type = other DNA
cagacgacggccagtgtcgacatgactgaagcacaaagacatcaaatcctcctggaaatgctcgcacaattaacacttcttgcggcgatggttcctggctcttcgatcgcgcaaggggtcagcattctgcgtgttatcggatcctacggtcattcagc

SEQ ID NO: 2131 - DNA, 158 bp, synthetic construct
  misc_feature 1..158: note = Synthetic nucleic acid
  source 1..158: mol_type = other DNA
cagacgacggccagtgtcgacatggaacgaggcactgcgtctggtggtgcctctttaaacacttcttgcggcgatggttcctggctcttcgatcttttatggctgcacagtaactttatttgtttaattaacaccggaggatcctacggtcattcagc

SEQ ID NO: 2132 - DNA, 158 bp, synthetic construct
  misc_feature 1..158: note = Synthetic nucleic acid
  source 1..158: mol_type = other DNA
cagacgacggccagtgtcgacatggatcacgcaatttataccgcgatgggagcagccagccagaaacacttcttgcggcgatggttcctggctcttcgatccgcaggccgtgccaaccaactgctgtcgatgagtggatcctacggtcattcagccgc

SEQ ID NO: 2133 - DNA, 158 bp, synthetic construct
  misc_feature 1..158: note = Synthetic nucleic acid
  source 1..158: mol_type = other DNA
cagacgacggccagtgtcgacatggcaacggttaataaacaagccattgcagcggcatttaacacttcttgcggcgatggttcctggctcttcgatctgacgtatcatctttttttgggagtgattgctcgtgagctgggatcctacggtcattcagc

SEQ ID NO: 2134 - DNA, 158 bp, synthetic construct
  misc_feature 1..158: note = Synthetic nucleic acid
  source 1..158: mol_type = other DNA
cagacgacggccagtgtcgacatggtggataagtcacaagaaacgacgcactttggttttcagacaacacttcttgcggcgatggttcctggctcttcgatcggggttgtggcgctgcatcgtggttataagttcagtggatcctacggtcattcagc

SEQ ID NO: 2135 - DNA, 158 bp, synthetic construct
  misc_feature 1..158: note = Synthetic nucleic acid
  source 1..158: mol_type = other DNA
cagacgacggccagtgtcgacgtggctgttcatttgcttattgtcgatgcactgaatcttattcgtaacacttcttgcggcgatggttcctggctcttcgatcacggcaatttacagcaattgcggttggtacggggtggatcctacggtcattcagc

SEQ ID NO: 2136 - DNA, 158 bp, synthetic construct
  misc_feature 1..158: note = Synthetic nucleic acid
  source 1..158: mol_type = other DNA
cagacgacggccagtgtcgacttgagtgcgggacgcctgaataaaaaatctctgggtatcgtgatgttgttataacacttcttgcggcgatggttcctggctcttcgatcgcctcagggcagcaagccaaaatgccaaggatcctacggtcattcagc

SEQ ID NO: 2137 - DNA, 158 bp, synthetic construct
  misc_feature 1..158: note = Synthetic nucleic acid
  source 1..158: mol_type = other DNA
cagacgacggccagtgtcgacatgaaccttgaagccttaccaaaatattactccccaaaatctccaaaattgagaacacttcttgcggcgatggttcctggctcttcgatcgcgcaattgaggaaggtgacgagaactggatcctacggtcattcagc

SEQ ID NO: 2138 - DNA, 158 bp, synthetic construct
  misc_feature 1..158: note = Synthetic nucleic acid
  source 1..158: mol_type = other DNA
cagacgacggccagtgtcgacatgaccattaaaaatgtaatttgcgatatcgacggcgtgctgataacacttcttgcggcgatggttcctggctcttcgatcatttacccgtcagtcgctgaaatcgacgttatcggtggatcctacggtcattcagc

SEQ ID NO: 2139 - DNA, 158 bp, synthetic construct
  misc_feature 1..158: note = Synthetic nucleic acid
  source 1..158: mol_type = other DNA
cagacgacggccagtgtcgacatgagtgccattgaagttaagaacctggtgaaaaaattccacggtcaaacacttcttgcggcgatggttcctggctcttcgatccgccagttcctcgagaagtttctgctgcaacttggatcctacggtcattcagc

SEQ ID NO: 2140 - DNA, 158 bp, synthetic construct
  misc_feature 1..158: note = Synthetic nucleic acid
  source 1..158: mol_type = other DNA
cagacgacggccagtgtcgacatgatcccggaaaagcgaattatacggcgcattcagtctggcggttaacacttcttgcggcgatggttcctggctcttcgatcccagcttgctggtcatacgcgtaacgttgccatcggatcctacggtcattcagc

SEQ ID NO: 2141 - DNA, 158 bp, synthetic construct
  misc_feature 1..158: note = Synthetic nucleic acid
  source 1..158: mol_type = other DNA
cagacgacggccagtgtcgacatggctgtaactaagctggttctggttcgtcatggcgaaagtcagtaacacttcttgcggcgatggttcctggctcttcgatcagcggcggttgcaaaccagggtaaagcgaagagaggatcctacggtcattcagc

SEQ ID NO: 2142 - DNA, 158 bp, synthetic construct
  misc_feature 1..158: note = Synthetic nucleic acid
  source 1..158: mol_type = other DNA
cagacgacggccagtgtcgacgtgaaaatctgcttaattgatgaaacaggcaccggagacggtaacacttcttgcggcgatggttcctggctcttcgatcggcatcgctttgatatctatgcaggtacgccagtgagtggatcctacggtcattcagc

SEQ ID NO: 2143 - DNA, 158 bp, synthetic construct
  misc_feature 1..158: note = Synthetic nucleic acid
  source 1..158: mol_type = other DNA
cagacgacggccagtgtcgacatgaattcccgacaacaaactattctacagatggtcattgaccaggaacacttcttgcggcgatggttcctggctcttcgatccagtaaactcaccattcacgtcgttgacatttctggatcctacggtcattcagc

SEQ ID NO: 2144 - DNA, 158 bp, synthetic construct
  misc_feature 1..158: note = Synthetic nucleic acid
  source 1..158: mol_type = other DNA
cagacgacggccagtgtcgacatgattgaaatagaatcacgcgagctggcagatattcccgttcttaacacttcttgcggcgatggttcctggctcttcgatcatgctgccgtgacatttttccgccagcatctttccggatcctacggtcattcagc

SEQ ID NO: 2145 - DNA, 158 bp, synthetic construct
  misc_feature 1..158: note = Synthetic nucleic acid
  source 1..158: mol_type = other DNA
cagacgacggccagtgtcgacatggaacgcttactgattgttaatgccgatgattttggcttaagcaaaaacacttcttgcggcgatggttcctggctcttcgatcgttatcggttggggagttatcgggatgtgtggggatcctacggtcattcagc

SEQ ID NO: 2146 - DNA, 158 bp, synthetic construct
  misc_feature 1..158: note = Synthetic nucleic acid
  source 1..158: mol_type = other DNA
cagacgacggccagtgtcgacatggcgactcactttgcccgagggattttaacggaagaacacttcttgcggcgatggttcctggctcttcgatcttttgcccaactctctaccgtgaaggctttttcgccaaatccaggatcctacggtcattcagc

SEQ ID NO: 2147 - DNA, 158 bp, synthetic construct
  misc_feature 1..158: note = Synthetic nucleic acid
  source 1..158: mol_type = other DNA
cagacgacggccagtgtcgacatggcggaactcagcgatcaggagatgctgcgctacaaccaacacttcttgcggcgatggttcctggctcttcgatcactgatgcgtaatccggggtgtgaggtgtgtgggcaggggggatcctacggtcattcagc

SEQ ID NO: 2148 - DNA, 158 bp, synthetic construct
  misc_feature 1..158: note = Synthetic nucleic acid
  source 1..158: mol_type = other DNA
cagacgacggccagtgtcgacatgtccttgccgtcgattccatcctttgtattgtcgggattactaacacttcttgcggcgatggttcctggctcttcgatcgcgcgcaggattttgacggaagagacgattttgttcggatcctacggtcattcagc

SEQ ID NO: 2149 - DNA, 158 bp, synthetic construct
  misc_feature 1..158: note = Synthetic nucleic acid
  source 1..158: mol_type = other DNA
cagacgacggccagtgtcgacatgtctattgtgatgcagttacaagatgttgcggaatctacccgaacacttcttgcggcgatggttcctggctcttcgatcatcgaaggtcacagaatgctgatttcgaccatccttggatcctacggtcattcagc

SEQ ID NO: 2150 - DNA, 158 bp, synthetic construct
  misc_feature 1..158: note = Synthetic nucleic acid
  source 1..158: mol_type = other DNA
cagacgacggccagtgtcgacatgaaaaatattgcgacaggcgatgttcttgaacgtatccgcagaaacacttcttgcggcgatggttcctggctcttcgatcgtccgaatgtcgtccagccaggaattgcgaagactggatcctacggtcattcagc

SEQ ID NO: 2151 - DNA, 158 bp, synthetic construct
  misc_feature 1..158: note = Synthetic nucleic acid
  source 1..158: mol_type = other DNA
cagacgacggccagtgtcgacatgaagtctgtattaaaagtttcactggctgcactgaccctggaacacttcttgcggcgatggttcctggctcttcgatcaatctacaaaaaatggttcggtactgaaccgaaaataggatcctacggtcattcagc

SEQ ID NO: 2152 - DNA, 158 bp, synthetic construct
  misc_feature 1..158: note = Synthetic nucleic acid
  source 1..158: mol_type = other DNA
cagacgacggccagtgtcgacatgaataaattacagtcgtatttcattgccagcgtactttacgtaatgacaccaacacttcttgcggcgatggttcctggctcttcgatcgttttaacgcaacgtgttcctgactcaggatcctacggtcattcagc

SEQ ID NO: 2153 - DNA, 158 bp, synthetic construct
  misc_feature 1..158: note = Synthetic nucleic acid
  source 1..158: mol_type = other DNA
cagacgacggccagtgtcgacatgaatcagttaacggcttacaccttgcgcctgggcgataactaacacttcttgcggcgatggttcctggctcttcgatcgtatctccagcgtgtcttgcccggtcagcaatgggccggatcctacggtcattcagc

SEQ ID NO: 2154 - DNA, 158 bp, synthetic construct
  misc_feature 1..158: note = Synthetic nucleic acid
  source 1..158: mol_type = other DNA
cagacgacggccagtgtcgacatgagttttgtggtcattattcccgcgcgctacgcgtccacaacacttcttgcggcgatggttcctggctcttcgatccctgaagatcttgagcgcgttcgcgctgaaatgcgcccgggatcctacggtcattcagc

SEQ ID NO: 2155 - DNA, 158 bp, synthetic construct
  misc_feature 1..158: note = Synthetic nucleic acid
  source 1..158: mol_type = other DNA
cagacgacggccagtgtcgacatgatcgttttagtaactggagcaacggcaggttttggtgaatgaacacttcttgcggcgatggttcctggctcttcgatccaaagctatgccggactgaatgtccaccgtcagtttggatcctacggtcattcagc

SEQ ID NO: 2156 - DNA, 158 bp, synthetic construct
  misc_feature 1..158: note = Synthetic nucleic acid
  source 1..158: mol_type = other DNA
cagacgacggccagtgtcgacatggaacaagcgcatacccagctgattgcccaactgaaaacacttcttgcggcgatggttcctggctcttcgatccactgtcgcagcgatctatacgtttttgtgtgcgaggagttgggatcctacggtcattcagc

SEQ ID NO: 2157 - DNA, 158 bp, synthetic construct
  misc_feature 1..158: note = Synthetic nucleic acid
  source 1..158: mol_type = other DNA
cagacgacggccagtgtcgacatggatatcccacgtatttttaccatcagcgaaagtgaacaccgcatccataaaacacttcttgcggcgatggttcctggctcttcgatcggcgtgttcgcactcatcgcccggttgggatcctacggtcattcagc

SEQ ID NO: 2158 - DNA, 158 bp, synthetic construct
  misc_feature 1..158: note = Synthetic nucleic acid
  source 1..158: mol_type = other DNA
cagacgacggccagtgtcgacatggatttcagcggtaaaaatgtctgggtaaccggcgcaggtaaaggtatcgaacacttcttgcggcgatggttcctggctcttcgatccgatggcggctcaacgctgggggcagtaggatcctacggtcattcagc

SEQ ID NO: 2159 - DNA, 158 bp, synthetic construct
  misc_feature 1..158: note = Synthetic nucleic acid
  source 1..158: mol_type = other DNA
cagacgacggccagtgtcgacatggcattactggaaatttgctgttacagcatggaatgtgcaaacacttcttgcggcgatggttcctggctcttcgatcaaatgaaaggaatcattgaacgccatcaggccaaatacggatcctacggtcattcagc

SEQ ID NO: 2160 - DNA, 158 bp, synthetic construct
  misc_feature 1..158: note = Synthetic nucleic acid
  source 1..158: mol_type = other DNA
cagacgacggccagtgtcgacatggctgattgggtaacaggcaaagtcactaaagtgcagaactggaaacacttcttgcggcgatggttcctggctcttcgatcaccgggccatatgacagcggagcattactggaacggatcctacggtcattcagc

SEQ ID NO: 2161 - DNA, 158 bp, synthetic construct
  misc_feature 1..158: note = Synthetic nucleic acid
  source 1..158: mol_type = other DNA
cagacgacggccagtgtcgacatgttaagtattaaagatttacacgtcagcgtggaagataaagctatcctgcgaacacttcttgcggcgatggttcctggctcttcgatctatggctggcttaccgaacagcagttcggatcctacggtcattcagc

SEQ ID NO: 2162 - DNA, 158 bp, synthetic construct
  misc_feature 1..158: note = Synthetic nucleic acid
  source 1..158: mol_type = other DNA
cagacgacggccagtgtcgacatgttgcttagcataatcactgtcgcgtttcgtaacctcgaaaacacttcttgcggcgatggttcctggctcttcgatcctacctcaaagacgaaagccttatataacaaagtcgacggatcctacggtcattcagc

SEQ ID NO: 2163 - DNA, 158 bp, synthetic construct
  misc_feature 1..158: note = Synthetic nucleic acid
  source 1..158: mol_type = other DNA
cagacgacggccagtgtcgacgtgaccaaactcaaacttctggcacttggagtgcttatcgaacacttcttgcggcgatggttcctggctcttcgatcgactggcctgatttctaccgggatcacctacaaattcagcggatcctacggtcattcagc

SEQ ID NO: 2164 - DNA, 158 bp, synthetic construct
  misc_feature 1..158: note = Synthetic nucleic acid
  source 1..158: mol_type = other DNA
cagacgacggccagtgtcgacatgagtaaattattttgggcgatgctctcatttattacgcgtctgcctaacacttcttgcggcgatggttcctggctcttcgatcgtgaactggtcttcctgctggcactgctacctggatcctacggtcattcagc

SEQ ID NO: 2165 - DNA, 158 bp, synthetic construct
  misc_feature 1..158: note = Synthetic nucleic acid
  source 1..158: mol_type = other DNA
cagacgacggccagtgtcgacatgagtaactggccttatccccgcatcgtcgctcatcgtaacacttcttgcggcgatggttcctggctcttcgatcatgcgattgacgtgattggtccgaactttacggcccaacgtggatcctacggtcattcagc

SEQ ID NO: 2166 - DNA, 158 bp, synthetic construct
  misc_feature 1..158: note = Synthetic nucleic acid
  source 1..158: mol_type = other DNA
cagacgacggccagtgtcgacatgcagacccaggtcctttttgaacatccactaaatgaaaaaatgcaacacttcttgcggcgatggttcctggctcttcgatcggaacgtctggatttcgaactggcctgttgcattggatcctacggtcattcagc

SEQ ID NO: 2167 - DNA, 158 bp, synthetic construct
  misc_feature 1..158: note = Synthetic nucleic acid
  source 1..158: mol_type = other DNA
cagacgacggccagtgtcgacatggctatagcacttgtgactggtggcagtcgcggcataacacttcttgcggcgatggttcctggctcttcgatctacgtcacgggaagttttatcgatttggcgggcgggaaacccggatcctacggtcattcagc

SEQ ID NO: 2168 - DNA, 158 bp, synthetic construct
  misc_feature 1..158: note = Synthetic nucleic acid
  source 1..158: mol_type = other DNA
cagacgacggccagtgtcgacatgtctatcacggcgcagtccgtataccgtgaaacacttcttgcggcgatggttcctggctcttcgatcatattgctcatctatctgttccgcctgtatatgttgattcgccaaacaggatcctacggtcattcagc

SEQ ID NO: 2169 - DNA, 158 bp, synthetic construct
  misc_feature 1..158: note = Synthetic nucleic acid
  source 1..158: mol_type = other DNA
cagacgacggccagtgtcgacatgtctcaccgcgacacgctattttctgcccctatcgcaacacttcttgcggcgatggttcctggctcttcgatctttggttcactggtggcattaaaagcagaggacgctgcacagggatcctacggtcattcagc

SEQ ID NO: 2170 - DNA, 158 bp, synthetic construct
  misc_feature 1..158: note = Synthetic nucleic acid
  source 1..158: mol_type = other DNA
cagacgacggccagtgtcgacatgaataacaacaccacggcaccaacctatacgctgcgtggaacacttcttgcggcgatggttcctggctcttcgatcctgcgttatttacgctggcactacaccggcaacctatttggatcctacggtcattcagc

SEQ ID NO: 2171 - DNA, 158 bp, synthetic construct
  misc_feature 1..158: note = Synthetic nucleic acid
  source 1..158: mol_type = other DNA
cagacgacggccagtgtcgacatgagtatccttgtcacccgcccgtctcccgctggaaacacttcttgcggcgatggttcctggctcttcgatcccgataacgctgacaacgatgcgcttttacgggcattacaagcgggatcctacggtcattcagc

SEQ ID NO: 2172 - DNA, 158 bp, synthetic construct
  misc_feature 1..158: note = Synthetic nucleic acid
  source 1..158: mol_type = other DNA
cagacgacggccagtgtcgacatgcgtaaaatcgcattaattcttgcgatgttgttgatcccgtgcaacacttcttgcggcgatggttcctggctcttcgatctggcatcaaactacacgctccccgaggcaaaattcggatcctacggtcattcagc

SEQ ID NO: 2173 - DNA, 158 bp, synthetic construct
  misc_feature 1..158: note = Synthetic nucleic acid
  source 1..158: mol_type = other DNA
cagacgacggccagtgtcgacatgctgcaaaatattcgaattgtgctggtggagacgtcaaacacttcttgcggcgatggttcctggctcttcgatccttctattgagcagcagaataaaggtaacaaggccgaagtgggatcctacggtcattcagc

SEQ ID NO: 2174 - DNA, 158 bp, synthetic construct
  misc_feature 1..158: note = Synthetic nucleic acid
  source 1..158: mol_type = other DNA
cagacgacggccagtgtcgacatggcaggtcatagtaaatgggccaacaccagacatcgtaaaaacacttcttgcggcgatggttcctggctcttcgatcacggtgaaatctctgatgaggtcgcagcgactctcccgggatcctacggtcattcagc

SEQ ID NO: 2175 - DNA, 158 bp, synthetic construct
  misc_feature 1..158: note = Synthetic nucleic acid
  source 1..158: mol_type = other DNA
cagacgacggccagtgtcgacatgtcagttattggtcgcattcactcctttgaatcctgtggaaaacacttcttgcggcgatggttcctggctcttcgatccattcttgagcagtacggtcataaggtaatgttccacggatcctacggtcattcagc

SEQ ID NO: 2176 - DNA, 158 bp, synthetic construct
  misc_feature 1..158: note = Synthetic nucleic acid
  source 1..158: mol_type = other DNA
cagacgacggccagtgtcgacatgtctatagactggaactggggtatttttttacaacaagccccgttcggcaaaacacttcttgcggcgatggttcctggctcttcgatcctgcctggcaacatggggggcaaacgtggatcctacggtcattcagc

SEQ ID NO: 2177 - DNA, 158 bp, synthetic construct
  misc_feature 1..158: note = Synthetic nucleic acid
  source 1..158: mol_type = other DNA
cagacgacggccagtgtcgacatgttaattaatcgcaatattgtggcgttatttgcgttgccttttatggcaaaacacttcttgcggcgatggttcctggctcttcgatctgtcaccggggtgagctggcgttttttcggatcctacggtcattcagc

SEQ ID NO: 2178 - DNA, 158 bp, synthetic construct
  misc_feature 1..158: note = Synthetic nucleic acid
  source 1..158: mol_type = other DNA
cagacgacggccagtgtcgacatgttagatcaagtatgccagcttgcacggaatgcaggaacacttcttgcggcgatggttcctggctcttcgatcgagtcgttcctgaatccggggttcagagtgtctatttacactggatcctacggtcattcagc

SEQ ID NO: 2179 - DNA, 158 bp, synthetic construct
  misc_feature 1..158: note = Synthetic nucleic acid
  source 1..158: mol_type = other DNA
cagacgacggccagtgtcgacgtgaagttcaaagttatcgccctggcggcattaatgggtattaaacacttcttgcggcgatggttcctggctcttcgatcggatcaacaacccgctaaaacacctgcagcacaaattggatcctacggtcattcagc

SEQ ID NO: 2180 - DNA, 158 bp, synthetic construct
  misc_feature 1..158: note = Synthetic nucleic acid
  source 1..158: mol_type = other DNA
cagacgacggccagtgtcgacatgaaaaacgttggcgacctgatgcaacgcctgcaaaaaataacacttcttgcggcgatggttcctggctcttcgatcgatagctaccgtagccgggtaacaggtaaagagtatttaggatcctacggtcattcagc

SEQ ID NO: 2181 - DNA, 158 bp, synthetic construct
  misc_feature 1..158: note = Synthetic nucleic acid
  source 1..158: mol_type = other DNA
cagacgacggccagtgtcgacatgacgcgcatgaaatatctggtggcagccgccaaacacttcttgcggcgatggttcctggctcttcgatctgaaaaagtagcgaaaatcatcgccgcaaacagcagcaatacaccaggatcctacggtcattcagc

SEQ ID NO: 2182 - DNA, 158 bp, synthetic construct
  misc_feature 1..158: note = Synthetic nucleic acid
  source 1..158: mol_type = other DNA
cagacgacggccagtgtcgacatgacgttaactgcttcatcttcttcccgcgctgttacgaattaacacttcttgcggcgatggttcctggctcttcgatcgaaagcgatcaacgcctctttacagcggagtgcacggggatcctacggtcattcagc

SEQ ID NO: 2183 - DNA, 158 bp, synthetic construct
  misc_feature 1..158: note = Synthetic nucleic acid
  source 1..158: mol_type = other DNA
cagacgacggccagtgtcgacatgattaaacaaactattgtcgcgttgcttttgagtgtgggagcaacacttcttgcggcgatggttcctggctcttcgatcattcttcagactctgacgcagcggatacctcaacgtggatcctacggtcattcagc

SEQ ID NO: 2184 - DNA, 158 bp, synthetic construct
  misc_feature 1..158: note = Synthetic nucleic acid
  source 1..158: mol_type = other DNA
cagacgacggccagtgtcgacatgattattccggcattagatttaatcgacggcactgtggtgcgtctaacacttcttgcggcgatggttcctggctcttcgatcaaggaggccatcgcatgctggcaaaacgcagccggatcctacggtcattcagc

SEQ ID NO: 2185 - DNA, 158 bp, synthetic construct
  misc_feature 1..158: note = Synthetic nucleic acid
  source 1..158: mol_type = other DNA
cagacgacggccagtgtcgacatgcgtcgtttattgtctgtcgcacctgtccttctctggctgattaaacacttcttgcggcgatggttcctggctcttcgatcggtcggttcgctggcgcagagcttttacagccctggatcctacggtcattcagc

SEQ ID NO: 2186 - DNA, 158 bp, synthetic construct
  misc_feature 1..158: note = Synthetic nucleic acid
  source 1..158: mol_type = other DNA
cagacgacggccagtgtcgacatggaaagccctactccacagcctgctcctggttcggaacacttcttgcggcgatggttcctggctcttcgatcgttaatccaggcattctggcaaggagcgcccgatgagctaggatcctacggtcattcagccgc

SEQ ID NO: 2187 - DNA, 158 bp, synthetic construct
  misc_feature 1..158: note = Synthetic nucleic acid
  source 1..158: mol_type = other DNA
cagacgacggccagtgtcgacatgtggaaaacactgcatcaactggcgatcccaccaaacacttcttgcggcgatggttcctggctcttcgatcgtccgtgggtgagtgaactgatactgaaaagaggccgtaaagatggatcctacggtcattcagc

SEQ ID NO: 2188 - DNA, 158 bp, synthetic construct
  misc_feature 1..158: note = Synthetic nucleic acid
  source 1..158: mol_type = other DNA
cagacgacggccagtgtcgacatgaaaattgacctgaacgccgatctgggcgaaggctgcaacacttcttgcggcgatggttcctggctcttcgatcgctctgcatttgccgaaaaggggattgttgtcgcagcagatggatcctacggtcattcagc

SEQ ID NO: 2189 - DNA, 158 bp, synthetic construct
  misc_feature 1..158: note = Synthetic nucleic acid
  source 1..158: mol_type = other DNA
cagacgacggccagtgtcgacatgaattttgaaggaaaaatcgcactggtaaccggtgcaagcaacacttcttgcggcgatggttcctggctcttcgatcaaactttgcatgtgaacggcgggatgtacatggtctgcggatcctacggtcattcagc

SEQ ID NO: 2190 - DNA, 158 bp, synthetic construct
  misc_feature 1..158: note = Synthetic nucleic acid
  source 1..158: mol_type = other DNA
cagacgacggccagtgtcgacatggctgagatgaaaaacctgaaaattgaggtggtgcgctataaaacacttcttgcggcgatggttcctggctcttcgatcaaagactttcttatcgcgaccctgaaaccacgcagcggatcctacggtcattcagc

SEQ ID NO: 2191 - DNA, 158 bp, synthetic construct
  misc_feature 1..158: note = Synthetic nucleic acid
  source 1..158: mol_type = other DNA
cagacgacggccagtgtcgacatgtccaaactcgatctaaacgccctgaacgaactgcaacacttcttgcggcgatggttcctggctcttcgatctttctttggcttaaaaagggaatgtgggttacacgaagggtgtggatcctacggtcattcagc

SEQ ID NO: 2192 - DNA, 158 bp, synthetic construct
  misc_feature 1..158: note = Synthetic nucleic acid
  source 1..158: mol_type = other DNA
cagacgacggccagtgtcgacgtgaaagtcatcattgttgaagacgaattcctggcacaacaggaaaacacttcttgcggcgatggttcctggctcttcgatcaagtgaaagaatttcgccagttaatgcatcttgagggatcctacggtcattcagc

SEQ ID NO: 2193 - DNA, 158 bp, synthetic construct
  misc_feature 1..158: note = Synthetic nucleic acid
  source 1..158: mol_type = other DNA
cagacgacggccagtgtcgacgtgagtcattaccatgagcagttcctgaaacaaaatccgttagccgtcaacacttcttgcggcgatggttcctggctcttcgatccccgggaaaaagcggacaaagtgcgcgacggatcctacggtcattcagccgc

SEQ ID NO: 2194 - DNA, 158 bp, synthetic construct
  misc_feature 1..158: note = Synthetic nucleic acid
  source 1..158: mol_type = other DNA
cagacgacggccagtgtcgacgtgggtaataatttaatgcagacggacctttccgtctggggtatgtataacacttcttgcggcgatggttcctggctcttcgatcttcgtgtcgcacaaaaattacgcgcaggaaaaggatcctacggtcattcagc

SEQ ID NO: 2195 - DNA, 158 bp, synthetic construct
  misc_feature 1..158: note = Synthetic nucleic acid
  source 1..158: mol_type = other DNA
cagacgacggccagtgtcgacatgaaaaaagttctgattgccgcgttaattgcaggttttagtctttccaacacttcttgcggcgatggttcctggctcttcgatcaaaccatctacaacaaatggttccagaagaacggatcctacggtcattcagc

SEQ ID NO: 2196 - DNA, 158 bp, synthetic construct
  misc_feature 1..158: note = Synthetic nucleic acid
  source 1..158: mol_type = other DNA
cagacgacggccagtgtcgacatgaaaaagttagttcttgccgctttacttgcttcctttactttcggtaacacttcttgcggcgatggttcctggctcttcgatcaaaaaatcagtgaccagtggttcccacagcacggatcctacggtcattcagc

SEQ ID NO: 2197 - DNA, 158 bp, synthetic construct
  misc_feature 1..158: note = Synthetic nucleic acid
  source 1..158: mol_type = other DNA
cagacgacggccagtgtcgacatgaaagcggcacgccagcaagcgatagtcgaaacacttcttgcggcgatggttcctggctcttcgatcattatttctgatgagcgccaggttgcaacttctttggtaacagccacgggatcctacggtcattcagc

SEQ ID NO: 2198 - DNA, 158 bp, synthetic construct
  misc_feature 1..158: note = Synthetic nucleic acid
  source 1..158: mol_type = other DNA
cagacgacggccagtgtcgacatgaagatgttgcgcgatccgctgttctggctcattgctctgtttgtaacacttcttgcggcgatggttcctggctcttcgatcctggtgcaggcgcttagccagcacgcaaaaaggggatcctacggtcattcagc

SEQ ID NO: 2199 - DNA, 158 bp, synthetic construct
  misc_feature 1..158: note = Synthetic nucleic acid
  source 1..158: mol_type = other DNA
cagacgacggccagtgtcgacatgagcactgcaattacacgccagatcgttctcgataccgaaacaacacttcttgcggcgatggttcctggctcttcgatccagaagaaaggcggaagttgcctctggcgagcacgtggatcctacggtcattcagc

SEQ ID NO: 2200 - DNA, 158 bp, synthetic construct
  misc_feature 1..158: note = Synthetic nucleic acid
  source 1..158: mol_type = other DNA
cagacgacggccagtgtcgacatgagcgaaatgatttacggcatccacgcagtgcaggccctaacacttcttgcggcgatggttcctggctcttcgatcggaatttgcttatttgaagcggtgcgccagcgcagcatgggatcctacggtcattcagc

SEQ ID NO: 2201 - DNA, 158 bp, synthetic construct
  misc_feature 1..158: note = Synthetic nucleic acid
  source 1..158: mol_type = other DNA
cagacgacggccagtgtcgacatgagtaagctgattgtcccgcagtggccgcagcaacacttcttgcggcgatggttcctggctcttcgatccgacaagaccaccggtcgtatggcaagtttcatttggctgatagcaggatcctacggtcattcagc

SEQ ID NO: 2202 - DNA, 158 bp, synthetic construct
  misc_feature 1..158: note = Synthetic nucleic acid
  source 1..158: mol_type = other DNA
cagacgacggccagtgtcgacatgcgtatcccccgcatttatcatcctgaaccactgaccaaacacttcttgcggcgatggttcctggctcttcgatccattaccgcgctacaagtacgatttggcgatttgggcaatggatcctacggtcattcagc

SEQ ID NO: 2203 - DNA, 158 bp, synthetic construct
  misc_feature 1..158: note = Synthetic nucleic acid
  source 1..158: mol_type = other DNA
cagacgacggccagtgtcgacatggcgctttacacaattggtgaagtggcgttgctttaacacttcttgcggcgatggttcctggctcttcgatcttggcaagaacaaggccatgatattttcccactcggcattttaggatcctacggtcattcagc

SEQ ID NO: 2204 - DNA, 158 bp, synthetic construct
  misc_feature 1..158: note = Synthetic nucleic acid
  source 1..158: mol_type = other DNA
cagacgacggccagtgtcgacatggctgaattactgttaggcgtcaacattgaccatatcgctacgctaacacttcttgcggcgatggttcctggctcttcgatcatgaagcgtctgatgctggaagcgcgtggcgacggatcctacggtcattcagc

SEQ ID NO: 2205 - DNA, 158 bp, synthetic construct
  misc_feature 1..158: note = Synthetic nucleic acid
  source 1..158: mol_type = other DNA
cagacgacggccagtgtcgacatgtcagctacggaccgctactctcatcaactcctaacacttcttgcggcgatggttcctggctcttcgatccgcgccaatcgcatcaccttaactattgataataaaagacatttaggatcctacggtcattcagc

SEQ ID NO: 2206 - DNA, 158 bp, synthetic construct
  misc_feature 1..158: note = Synthetic nucleic acid
  source 1..158: mol_type = other DNA
cagacgacggccagtgtcgacgtggcttattacagcattggtgatgttgctgaacgttgcaacacttcttgcggcgatggttcctggctcttcgatcggggtgagcaaggttataaagtcatctttcatgcccccgctggatcctacggtcattcagc

SEQ ID NO: 2207 - DNA, 158 bp, synthetic construct
  misc_feature 1..158: note = Synthetic nucleic acid
  source 1..158: mol_type = other DNA
cagacgacggccagtgtcgacatgaccgtaacccgcccacgcgccgaacgcggaacacttcttgcggcgatggttcctggctcttcgatcgcaaacttgctgcgctggcatcctaaagatgcaattcgcccgtcgggatcctacggtcattcagccgc

SEQ ID NO: 2208 - DNA, 158 bp, synthetic construct
  misc_feature 1..158: note = Synthetic nucleic acid
  source 1..158: mol_type = other DNA
cagacgacggccagtgtcgacatgactcatgtctgctcggtgatcctcattcgtcgttcattaacacttcttgcggcgatggttcctggctcttcgatccatcagtttgcgcaacattcgccaggtaccttttccaatggatcctacggtcattcagc

SEQ ID NO: 2209 - DNA, 158 bp, synthetic construct
  misc_feature 1..158: note = Synthetic nucleic acid
  source 1..158: mol_type = other DNA
cagacgacggccagtgtcgacatgagtaaaagccgcttaacggtgtttagtttcgttcgccgttttaacacttcttgcggcgatggttcctggctcttcgatcgtgagccgtttatgcaacaacaccagctggatccaggatcctacggtcattcagc

SEQ ID NO: 2210 - DNA, 158 bp, synthetic construct
  misc_feature 1..158: note = Synthetic nucleic acid
  source 1..158: mol_type = other DNA
cagacgacggccagtgtcgacatgagtattcaattaaacggcattaattgcttctacggcgcgcataacacttcttgcggcgatggttcctggctcttcgatcaaaccgaagcatttaaaaactatctctctcacttaggatcctacggtcattcagc

SEQ ID NO: 2211 - DNA, 158 bp, synthetic construct
  misc_feature 1..158: note = Synthetic nucleic acid
  source 1..158: mol_type = other DNA
cagacgacggccagtgtcgacatggaaaaaccaagagtactcgtactgacaggggcaggaatttaacacttcttgcggcgatggttcctggctcttcgatcgttgctgaagggattaaaagcgggaagcattgcccgaggatcctacggtcattcagc

SEQ ID NO: 2212 - DNA, 158 bp, synthetic construct
  misc_feature 1..158: note = Synthetic nucleic acid
  source 1..158: mol_type = other DNA
cagacgacggccagtgtcgacatggaaggctggcagcgcgcatttgtcctgcataaacacttcttgcggcgatggttcctggctcttcgatcccggcagtttatgcctaagcgaacggtgaaaacacattatgaaagcggatcctacggtcattcagc

SEQ ID NO: 2213 - DNA, 158 bp, synthetic construct
  misc_feature 1..158: note = Synthetic nucleic acid
  source 1..158: mol_type = other DNA
cagacgacggccagtgtcgacatgattaccctgaaaaatgtttcaaaatggtatggtcactttcaggtgctaacacttcttgcggcgatggttcctggctcttcgatcaaagacttcctcgcgaaaatcctgcatggaggatcctacggtcattcagc

SEQ ID NO: 2214 - DNA, 158 bp, synthetic construct
  misc_feature 1..158: note = Synthetic nucleic acid
  source 1..158: mol_type = other DNA
cagacgacggccagtgtcgacatgcacttgtctacacatccgaccagctacccaacacgctataacacttcttgcggcgatggttcctggctcttcgatccgcgcgccgacatgattgaattcactatggagcacatcggatcctacggtcattcagc

SEQ ID NO: 2215 - DNA, 158 bp, synthetic construct
  misc_feature 1..158: note = Synthetic nucleic acid
  source 1..158: mol_type = other DNA
cagacgacggccagtgtcgacatggacagtctcaatcttaataaacatatttccggccagttcaacgcaacacttcttgcggcgatggttcctggctcttcgatcaaactgctggcggggaaagatagcgacaaagtcggatcctacggtcattcagc

SEQ ID NO: 2216 - DNA, 158 bp, synthetic construct
  misc_feature 1..158: note = Synthetic nucleic acid
  source 1..158: mol_type = other DNA
cagacgacggccagtgtcgacatggcaacattaactgcaaagaaccttgcaaaagcctataaaggcaacacttcttgcggcgatggttcctggctcttcgatcagcgtgtataccttggggaagacttcagactcctgggatcctacggtcattcagc

SEQ ID NO: 2217 - DNA, 158 bp, synthetic construct
  misc_feature 1..158: note = Synthetic nucleic acid
  source 1..158: mol_type = other DNA
cagacgacggccagtgtcgacatggcaactgtttccatgcgcgacatgctcaaggctaacacttcttgcggcgatggttcctggctcttcgatcatctggcttcccaggcggaagaaagcttcgtagaagctgagttgggatcctacggtcattcagc

SEQ ID NO: 2218 - DNA, 158 bp, synthetic construct
  misc_feature 1..158: note = Synthetic nucleic acid
  source 1..158: mol_type = other DNA
cagacgacggccagtgtcgacatggctaccaatgcaaaacccgtctataaacgcattctgcttaaaacacttcttgcggcgatggttcctggctcttcgatcatgggtgaaaaagaagggactttaatcacggaatggggatcctacggtcattcagc

SEQ ID NO: 2219 - DNA, 158 bp, synthetic construct
  misc_feature 1..158: note = Synthetic nucleic acid
  source 1..158: mol_type = other DNA
cagacgacggccagtgtcgacatgaaaccggcaagagtccctcaaactgtcgtggctcctgattgaacacttcttgcggcgatggttcctggctcttcgatcggagccacccggcaatgtcgtaaaccacaggctcctggatcctacggtcattcagc

SEQ ID NO: 2220 - DNA, 158 bp, synthetic construct
  misc_feature 1..158: note = Synthetic nucleic acid
  source 1..158: mol_type = other DNA
cagacgacggccagtgtcgacatgaaattaatcattaccgaagattaccaggaaatgagccgtgtcgcggcaaacacttcttgcggcgatggttcctggctcttcgatcccgctgccgcagaattagcactcggtgccggatcctacggtcattcagc

SEQ ID NO: 2221 - DNA, 158 bp, synthetic construct
  misc_feature 1..158: note = Synthetic nucleic acid
  source 1..158: mol_type = other DNA
cagacgacggccagtgtcgacatgaatgccgaaaaatcgccggtaaaccataacgtagaccaaacacttcttgcggcgatggttcctggctcttcgatcgtggatgtgaactatatgctgcacacgcagaataagattggatcctacggtcattcagc

SEQ ID NO: 2222 - DNA, 158 bp, synthetic construct
  misc_feature 1..158: note = Synthetic nucleic acid
  source 1..158: mol_type = other DNA
cagacgacggccagtgtcgacatgaccgagttaccaatcgacgaaaacacaccgcgtattttgatcgtggaaaacacttcttgcggcgatggttcctggctcttcgatcgggaagccgacgcctgccgcatcgttttcggatcctacggtcattcagc

SEQ ID NO: 2223 - DNA, 158 bp, synthetic construct
  misc_feature 1..158: note = Synthetic nucleic acid
  source 1..158: mol_type = other DNA
cagacgacggccagtgtcgacatgacgccaaccattgaacttatttgtggccatcgctccattcgaacacttcttgcggcgatggttcctggctcttcgatcgattatttgcacaaacagggttgggcgacgcgcccgggatcctacggtcattcagc

SEQ ID NO: 2224 - DNA, 158 bp, synthetic construct
  misc_feature 1..158: note = Synthetic nucleic acid
  source 1..158: mol_type = other DNA
cagacgacggccagtgtcgacatgcaggataaggattttttcagctggcgtcgcacgatgctaacacttcttgcggcgatggttcctggctcttcgatccaggttgcctgttacgcggccgctactggcttaattgacggatcctacggtcattcagc

SEQ ID NO: 2225 - DNA, 158 bp, synthetic construct
  misc_feature 1..158: note = Synthetic nucleic acid
  source 1..158: mol_type = other DNA
cagacgacggccagtgtcgacatgggacacaagcccttataccggcagattgccaacacttcttgcggcgatggttcctggctcttcgatcatgactataaatttaccctgatagcgcagcgaaaatcatcgcgaagaggatcctacggtcattcagc

SEQ ID NO: 2226 - DNA, 158 bp, synthetic construct
  misc_feature 1..158: note = Synthetic nucleic acid
  source 1..158: mol_type = other DNA
cagacgacggccagtgtcgacatgggtaaaacccagcccttgccaatattaattactggcggaggtaacacttcttgcggcgatggttcctggctcttcgatcgtttcccacttgatggcggtcgtcatctgcgtaatggatcctacggtcattcagc

SEQ ID NO: 2227 - DNA, 158 bp, synthetic construct
  misc_feature 1..158: note = Synthetic nucleic acid
  source 1..158: mol_type = other DNA
cagacgacggccagtgtcgacatgtccaggtcgcttttaaccaacgaaaccagtgagttggatttaaacacttcttgcggcgatggttcctggctcttcgatctcaagagcggtgatttccaggggcaagataaggggggatcctacggtcattcagc

SEQ ID NO: 2228 - DNA, 158 bp, synthetic construct
  misc_feature 1..158: note = Synthetic nucleic acid
  source 1..158: mol_type = other DNA
cagacgacggccagtgtcgacgtgattgaatttaaaaacgtctccaagcactttggcccaacccaaacacttcttgcggcgatggttcctggctcttcgatccagcgcttgcaggaatttttgcagcacgtctctcggggatcctacggtcattcagc

SEQ ID NO: 2229 - DNA, 158 bp, synthetic construct
  misc_feature 1..158: note = Synthetic nucleic acid
  source 1..158: mol_type = other DNA
cagacgacggccagtgtcgacgtggcgacactctttattgcagatcttcatctctgcgtggaaaacacttcttgcggcgatggttcctggctcttcgatccggcggatgacgttgagctgattcattttccgttttttggatcctacggtcattcagc

SEQ ID NO: 2230 - DNA, 158 bp, synthetic construct
  misc_feature 1..158: note = Synthetic nucleic acid
  source 1..158: mol_type = other DNA
cagacgacggccagtgtcgacatgaaaaacgacgtcatttcaccggaatttgatgaaaacggcaacacttcttgcggcgatggttcctggctcttcgatcacggagtatgggacttaatgttcgagagggtgaaaggcggatcctacggtcattcagc

SEQ ID NO: 2231 - DNA, 158 bp, synthetic construct
  misc_feature 1..158: note = Synthetic nucleic acid
  source 1..158: mol_type = other DNA
cagacgacggccagtgtcgacatgaacactatcgtatttgtggaagatgatgcggaagtcggttaacacttcttgcggcgatggttcctggctcttcgatccaaaggctatctttttgcgcctcatgcatgggaaactggatcctacggtcattcagc

SEQ ID NO: 2232 - DNA, 158 bp, synthetic construct
  misc_feature 1..158: note = Synthetic nucleic acid
  source 1..158: mol_type = other DNA
cagacgacggccagtgtcgacatgacccttgatttacctcgccgcttcccctgaacacttcttgcggcgatggttcctggctcttcgatcgtggtgaatatcctgtttaaaattaacggcaccaccgaaattcaggatggatcctacggtcattcagc

SEQ ID NO: 2233 - DNA, 158 bp, synthetic construct
  misc_feature 1..158: note = Synthetic nucleic acid
  source 1..158: mol_type = other DNA
cagacgacggccagtgtcgacatgatcaatgtattaattatcgatgacgacgcaatggtcgcggaaacacttcttgcggcgatggttcctggctcttcgatcgaacactactcactactgaaacaatattgccaacagggatcctacggtcattcagc

SEQ ID NO: 2234 - DNA, 158 bp, synthetic construct
  misc_feature 1..158: note = Synthetic nucleic acid
  source 1..158: mol_type = other DNA
cagacgacggccagtgtcgacatgatgcgcaaaatgctgctggcggcagcactttaacacttcttgcggcgatggttcctggctcttcgatcgactctggaagatagccgcaaagccctggtcgggaatttaaaagacggatcctacggtcattcagc

SEQ ID NO: 2235 - DNA, 158 bp, synthetic construct
  misc_feature 1..158: note = Synthetic nucleic acid
  source 1..158: mol_type = other DNA
cagacgacggccagtgtcgacatgattaaagtcttaattgtcgatgatgaaccgttagcacgggagaacaacacttcttgcggcgatggttcctggctcttcgatctgaaaagcttaaaagaggcgattggcctgggaggatcctacggtcattcagc

SEQ ID NO: 2236 - DNA, 158 bp, synthetic construct
  misc_feature 1..158: note = Synthetic nucleic acid
  source 1..158: mol_type = other DNA
cagacgacggccagtgtcgacatgcaagagaactacaagattctggtggtcgatgacgacatgcgaacacttcttgcggcgatggttcctggctcttcgatcggctacgtctttgtaccggacggctctaaagcactaggatcctacggtcattcagc

SEQ ID NO: 2237 - DNA, 158 bp, synthetic construct
  misc_feature 1..158: note = Synthetic nucleic acid
  source 1..158: mol_type = other DNA
cagacgacggccagtgtcgacatggatttttttagtgtgcagaatatcctggtacatataccaataggggcaggcaacacttcttgcggcgatggttcctggctcttcgatcgaggctcacgcgcgctgtcccatcaaggatcctacggtcattcagc

SEQ ID NO: 2238 - DNA, 158 bp, synthetic construct
  misc_feature 1..158: note = Synthetic nucleic acid
  source 1..158: mol_type = other DNA
cagacgacggccagtgtcgacatggccgctatcccatggcggccttttaatttaaaacacttcttgcggcgatggttcctggctcttcgatcgaccattatcgatgaccatggcaactatattagtgacaaaattgcgggatcctacggtcattcagc

SEQ ID NO: 2239 - DNA, 158 bp, synthetic construct
  misc_feature 1..158: note = Synthetic nucleic acid
  source 1..158: mol_type = other DNA
cagacgacggccagtgtcgacatggctaccccacacattaatgcagaaatgggcgatttcgaacacttcttgcggcgatggttcctggctcttcgatcaatcgcactggaatccgttctgctgggcgataaagagatgggatcctacggtcattcagc

SEQ ID NO: 2240 - DNA, 158 bp, synthetic construct
  misc_feature 1..158: note = Synthetic nucleic acid
  source 1..158: mol_type = other DNA
cagacgacggccagtgtcgacatggtcattaaggcgcaaagcccggcgggtttcgaacacttcttgcggcgatggttcctggctcttcgatcgatgcagaaaaatctgccgggtgatttagccattcaggggcgacctggatcctacggtcattcagc

SEQ ID NO: 2241 - DNA, 158 bp, synthetic construct
  misc_feature 1..158: note = Synthetic nucleic acid
  source 1..158: mol_type = other DNA
cagacgacggccagtgtcgacatgttaaagcgcgtgttcctcagcctgttagtcctaacacttcttgcggcgatggttcctggctcttcgatcacacccgaacagttacttgaattacaaaagaaacaaggaaagcccggatcctacggtcattcagc

SEQ ID NO: 2242 - DNA, 158 bp, synthetic construct
  misc_feature 1..158: note = Synthetic nucleic acid
  source 1..158: mol_type = other DNA
cagacgacggccagtgtcgacgtgaatgtcaatttctttgtcacctgtattggtgacgccctaacacttcttgcggcgatggttcctggctcttcgatcaaagtgatgcatattgctgaagtgttgatgagccgcgaaggatcctacggtcattcagc

SEQ ID NO: 2243 - DNA, 158 bp, synthetic construct
  misc_feature 1..158: note = Synthetic nucleic acid
  source 1..158: mol_type = other DNA
cagacgacggccagtgtcgacgtgaattcactctataccgctgaaggtgtaatggataaacactcgctaacacttcttgcggcgatggttcctggctcttcgatcaaacggttacgcactaaactgggtaagttagctggatcctacggtcattcagc

SEQ ID NO: 2244 - DNA, 158 bp, synthetic construct
  misc_feature 1..158: note = Synthetic nucleic acid
  source 1..158: mol_type = other DNA
cagacgacggccagtgtcgacatgaacaatgtaaaattactgattgccggaagtgccttttttgccataacacttcttgcggcgatggttcctggctcttcgatcgggaaagctgtgataagcgtagtctacttgcggggatcctacggtcattcagc

SEQ ID NO: 2245 - DNA, 158 bp, synthetic construct
  misc_feature 1..158: note = Synthetic nucleic acid
  source 1..158: mol_type = other DNA
cagacgacggccagtgtcgacatgaatgaattttttcctttagcaagcgccgccgggatgaccgtcggcaacacttcttgcggcgatggttcctggctcttcgatcgcgcgacacgttttgagcggaggcccagcgggggatcctacggtcattcagc

SEQ ID NO: 2246 - DNA, 158 bp, synthetic construct
  misc_feature 1..158: note = Synthetic nucleic acid
  source 1..158: mol_type = other DNA
cagacgacggccagtgtcgacatgagactcgagttttcaatttatcgctataacccggatgttgatgatgaacacttcttgcggcgatggttcctggctcttcgatccaagtcgatgttgttgcaacgtaatgcgatcggatcctacggtcattcagc

SEQ ID NO: 2247 - DNA, 158 bp, synthetic construct
  misc_feature 1..158: note = Synthetic nucleic acid
  source 1..158: mol_type = other DNA
cagacgacggccagtgtcgacatgatctacaaaagcattgcggagcggttaagaattcgacttaactaacacttcttgcggcgatggttcctggctcttcgatcccatttacggcgactccacccggaaaagagtctgggatcctacggtcattcagc

SEQ ID NO: 2248 - DNA, 158 bp, synthetic construct
  misc_feature 1..158: note = Synthetic nucleic acid
  source 1..158: mol_type = other DNA
cagacgacggccagtgtcgacatgcagaccccgcacattcttatcgttgaagacgagttggtaaaacacttcttgcggcgatggttcctggctcttcgatctgaaggttatcgcttctgcggtgatctggaagatgagggatcctacggtcattcagc

SEQ ID NO: 2249 - DNA, 158 bp, synthetic construct
  misc_feature 1..158: note = Synthetic nucleic acid
  source 1..158: mol_type = other DNA
cagacgacggccagtgtcgacatgcgtttttaccggcctttggggcgcatctcggaacacttcttgcggcgatggttcctggctcttcgatcgcatctggaaatttcccggttggcatctctgacctcgctgatagcaggatcctacggtcattcagc

SEQ ID NO: 2250 - DNA, 158 bp, synthetic construct
  misc_feature 1..158: note = Synthetic nucleic acid
  source 1..158: mol_type = other DNA
cagacgacggccagtgtcgacatggaatggttaagtgaaattcgtaaacttcggaagaacgtacctgtaacacttcttgcggcgatggttcctggctcttcgatcttcccgtgtcgccataacagacacgagttagatggatcctacggtcattcagc

SEQ ID NO: 2251 - DNA, 158 bp, synthetic construct
  misc_feature 1..158: note = Synthetic nucleic acid
  source 1..158: mol_type = other DNA
cagacgacggccagtgtcgacgtgatcgaaatcttacatgaatactggaaaccgctgctgtggaaacacttcttgcggcgatggttcctggctcttcgatcctggttgcagcatgtgaaaccttcttcaacgcacaccggatcctacggtcattcagc

SEQ ID NO: 2252 - DNA, 158 bp, synthetic construct
  misc_feature 1..158: note = Synthetic nucleic acid
  source 1..158: mol_type = other DNA
cagacgacggccagtgtcgacgtgggacgtaaatgggccaatattgttgctaaaaaaacggctaaaaacacttcttgcggcgatggttcctggctcttcgatctacaaaaagtttatcataacgtcgcaaatctccttggatcctacggtcattcagc

SEQ ID NO: 2253 - DNA, 158 bp, synthetic construct
  misc_feature 1..158: note = Synthetic nucleic acid
  source 1..158: mol_type = other DNA
cagacgacggccagtgtcgacatgcaaaagcaagctgagttgtatcgtggtaaagcgaaaaccgtatacagcaaacacttcttgcggcgatggttcctggctcttcgatcccgccgcctgggtgtacagctggacgtaggatcctacggtcattcagc

SEQ ID NO: 2254 - DNA, 158 bp, synthetic construct
  misc_feature 1..158: note = Synthetic nucleic acid
  source 1..158: mol_type = other DNA
cagacgacggccagtgtcgacatgcgacacatttttcaacgattattgccccgacggctgtggaacacttcttgcggcgatggttcctggctcttcgatccgccatccacccatgaggtcactcctgatgagccatacggatcctacggtcattcagc

SEQ ID NO: 2255 - DNA, 158 bp, synthetic construct
  misc_feature 1..158: note = Synthetic nucleic acid
  source 1..158: mol_type = other DNA
cagacgacggccagtgtcgacatgcgcaagatcacacaggcaatcagtgccgtttgcttattaacacttcttgcggcgatggttcctggctcttcgatcgcgtttggtgaagaggtgatcgtcaattcagaatacgcgggatcctacggtcattcagc

SEQ ID NO: 2256 - DNA, 158 bp, synthetic construct
  misc_feature 1..158: note = Synthetic nucleic acid
  source 1..158: mol_type = other DNA
cagacgacggccagtgtcgacatggaaaaagtcatgttgtcctttgacaaagtcagcgcccactaaacacttcttgcggcgatggttcctggctcttcgatcaatgaagcggtgagaagtgcgtatttaggcgggactggatcctacggtcattcagc

SEQ ID NO: 2257 - DNA, 158 bp, synthetic construct
  misc_feature 1..158: note = Synthetic nucleic acid
  source 1..158: mol_type = other DNA
cagacgacggccagtgtcgacatggaatcatactcgcaaaacagcaataaattagattttcagcacgaggcaacacttcttgcggcgatggttcctggctcttcgatctggcaaaggcatacgcgtttttttcataaaggatcctacggtcattcagc

SEQ ID NO: 2258 - DNA, 158 bp, synthetic construct
  misc_feature 1..158: note = Synthetic nucleic acid
  source 1..158: mol_type = other DNA
cagacgacggccagtgtcgacatgggcgcttttacaggtaagacagttctcatcctcggtggcagtaacacttcttgcggcgatggttcctggctcttcgatccgatgcataccattgatggcgcgtttggcgcagaaggatcctacggtcattcagc

SEQ ID NO: 2259 - DNA, 158 bp, synthetic construct
  misc_feature 1..158: note = Synthetic nucleic acid
  source 1..158: mol_type = other DNA
cagacgacggccagtgtcgacatgttatttgcatggataaccgatcctaacgcctggcttaacacttcttgcggcgatggttcctggctcttcgatcaaagcctcaacttgattcgcaacaaaaagaatccgctcttgggatcctacggtcattcagc

SEQ ID NO: 2260 - DNA, 158 bp, synthetic construct
  misc_feature 1..158: note = Synthetic nucleic acid
  source 1..158: mol_type = other DNA
cagacgacggccagtgtcgacgtgaaaattgaattaacggtgaatgggctgaagatacaggcacaaacacttcttgcggcgatggttcctggctcttcgatcatgactgaagaaggccggtatcacttcacaagcaccggatcctacggtcattcagc

SEQ ID NO: 2261 - DNA, 158 bp, synthetic construct
  misc_feature 1..158: note = Synthetic nucleic acid
  source 1..158: mol_type = other DNA
cagacgacggccagtgtcgacgtgaatcaacgtaatatgtcaataattaattccacgccagtgcgtgttattgccattaacacttcttgcggcgatggttcctggctcttcgatccaattcacgccgcgctttccgtcggatcctacggtcattcagc

SEQ ID NO: 2262 - DNA, 158 bp, synthetic construct
  misc_feature 1..158: note = Synthetic nucleic acid
  source 1..158: mol_type = other DNA
cagacgacggccagtgtcgacatgaacgctgagcgtaaatttctttttgcctgtcttatttttgcgaacacttcttgcggcgatggttcctggctcttcgatcgcagcccacttactcacccaaaaaatgaaggagagggatcctacggtcattcagc

SEQ ID NO: 2263 - DNA, 158 bp, synthetic construct
  misc_feature 1..158: note = Synthetic nucleic acid
  source 1..158: mol_type = other DNA
cagacgacggccagtgtcgacatgaagaaaggttttatgttgtttactttgttagcggcgttttcaggctttaacacttcttgcggcgatggttcctggctcttcgatcaacaccaaaaaatgaccagcggtaaagtcggatcctacggtcattcagc

SEQ ID NO: 2264 - DNA, 158 bp, synthetic construct
  misc_feature 1..158: note = Synthetic nucleic acid
  source 1..158: mol_type = other DNA
cagacgacggccagtgtcgacatgactaatacgtggaacagattggcgctcttgattttcgccgttttataacacttcttgcggcgatggttcctggctcttcgatcgagtgcaaagaaggagcaaaatctgccctacggatcctacggtcattcagc

SEQ ID NO: 2265 - DNA, 158 bp, synthetic construct
  misc_feature 1..158: note = Synthetic nucleic acid
  source 1..158: mol_type = other DNA
cagacgacggccagtgtcgacatgatcgaactcgtgattgtatcgcgtctccttgaatatccgaacacttcttgcggcgatggttcctggctcttcgatccgcaatatctgaatatcaccaccggaggacagcacgacggatcctacggtcattcagc

SEQ ID NO: 2266 - DNA, 158 bp, synthetic construct
  misc_feature 1..158: note = Synthetic nucleic acid
  source 1..158: mol_type = other DNA
cagacgacggccagtgtcgacatggcaaccactcatttggatgtttgcgccgtggttaacacttcttgcggcgatggttcctggctcttcgatcccgagttttacctcacccgaaccatccatcaggagaatacaagaggatcctacggtcattcagc

SEQ ID NO: 2267 - DNA, 158 bp, synthetic construct
  misc_feature 1..158: note = Synthetic nucleic acid
  source 1..158: mol_type = other DNA
cagacgacggccagtgtcgacatggcgacaggaaagtcctgctctcgctggtttgcaacacttcttgcggcgatggttcctggctcttcgatcgcgtttaatcaggcctggactacagcagttactgcaacccaaagcggatcctacggtcattcagc

SEQ ID NO: 2268 - DNA, 158 bp, synthetic construct
  misc_feature 1..158: note = Synthetic nucleic acid
  source 1..158: mol_type = other DNA
cagacgacggccagtgtcgacatggcggagaatcaatccaccgtagaaaatgcaaaagagaaaaacacttcttgcggcgatggttcctggctcttcgatcggcgatttgaggccgtagacctcatcattaatctgcacggatcctacggtcattcagc

SEQ ID NO: 2269 - DNA, 158 bp, synthetic construct
  misc_feature 1..158: note = Synthetic nucleic acid
  source 1..158: mol_type = other DNA
cagacgacggccagtgtcgacatggtgaaaaaagcgatagtgacagcgatggctgtaatcagcaacacttcttgcggcgatggttcctggctcttcgatctttaccccaaccaggattgcagtagtttggggcagacgggatcctacggtcattcagc

SEQ ID NO: 2270 - DNA, 158 bp, synthetic construct
  misc_feature 1..158: note = Synthetic nucleic acid
  source 1..158: mol_type = other DNA
cagacgacggccagtgtcgacatgttcaggcgacgtggcgtaacattaactaaggccctgctgacaaacacttcttgcggcgatggttcctggctcttcgatcattcctgtccggctaagcccccttcggcggacatcggatcctacggtcattcagc

SEQ ID NO: 2271 - DNA, 158 bp, synthetic construct
  misc_feature 1..158: note = Synthetic nucleic acid
  source 1..158: mol_type = other DNA
cagacgacggccagtgtcgacatgaagcaaccaggggaagaactgcaggaaacactcacggagcttaacacttcttgcggcgatggttcctggctcttcgatccggagcttctggagcgttggattgaacgcgtagagggatcctacggtcattcagc

SEQ ID NO: 2272 - DNA, 158 bp, synthetic construct
  misc_feature 1..158: note = Synthetic nucleic acid
  source 1..158: mol_type = other DNA
cagacgacggccagtgtcgacatgaataaggaagaacaatatcttctttttgcgctttctgcgcccataacacttcttgcggcgatggttcctggctcttcgatcccggtaacgcttaaggatgtgagcgacctaaccggatcctacggtcattcagc

SEQ ID NO: 2273 - DNA, 158 bp, synthetic construct
  misc_feature 1..158: note = Synthetic nucleic acid
  source 1..158: mol_type = other DNA
cagacgacggccagtgtcgacatgagcagtttccagttcgagcaaataggcgttattcgctcgccaacacttcttgcggcgatggttcctggctcttcgatcgcaggttttgaagtctttgcgctggaaccgcgtcagggatcctacggtcattcagc

SEQ ID NO: 2274 - DNA, 158 bp, synthetic construct
  misc_feature 1..158: note = Synthetic nucleic acid
  source 1..158: mol_type = other DNA
cagacgacggccagtgtcgacatgatgatgatgcaatcgcgaaaaatctggtactaccgtataaccctaacacttcttgcggcgatggttcctggctcttcgatcatatggcttgaacgccagaagaggaatgccggcggatcctacggtcattcagc

SEQ ID NO: 2275 - DNA, 158 bp, synthetic construct
  misc_feature 1..158: note = Synthetic nucleic acid
  source 1..158: mol_type = other DNA
cagacgacggccagtgtcgacatgcaacagaaaagcgacaacgttgtcagccactataacacttcttgcggcgatggttcctggctcttcgatcgtagccacaaatttggcaaaataagtaacaaggagcgttcacttggatcctacggtcattcagc

SEQ ID NO: 2276 - DNA, 158 bp, synthetic construct
  misc_feature 1..158: note = Synthetic nucleic acid
  source 1..158: mol_type = other DNA
cagacgacggccagtgtcgacatggacatggagtcgcaaaaaatattgtttgcactttccactccaacacttcttgcggcgatggttcctggctcttcgatctgcccggaaacgcttaaggatatgagcgacctaacaggatcctacggtcattcagc

SEQ ID NO: 2277 - DNA, 158 bp, synthetic construct
  misc_feature 1..158: note = Synthetic nucleic acid
  source 1..158: mol_type = other DNA
cagacgacggccagtgtcgacatgtaccgttatttgtctattgctgcggtggtactgagcgcagcattttcaacacttcttgcggcgatggttcctggctcttcgatccaacgcgcttgccaggcgcgaaagagctcaggatcctacggtcattcagc

SEQ ID NO: 2278 - DNA, 158 bp, synthetic construct
  misc_feature 1..158: note = Synthetic nucleic acid
  source 1..158: mol_type = other DNA
cagacgacggccagtgtcgacgtggtcatcggcccttttatcaacgctagtgcagtcttactgggtggcgttaacacttcttgcggcgatggttcctggctcttcgatcccgccgcctggaccgcctggtttgccccaggatcctacggtcattcagc

SEQ ID NO: 2279 - DNA, 158 bp, synthetic construct
  misc_feature 1..158: note = Synthetic nucleic acid
  source 1..158: mol_type = other DNA
cagacgacggccagtgtcgacatgaacgatattgcgcataacctggcacaggtccgaacacttcttgcggcgatggttcctggctcttcgatcatcggcactgcaatttttggtgcgcgtgattactctaaaaaagggggatcctacggtcattcagc

SEQ ID NO: 2280 - DNA, 158 bp, synthetic construct
  misc_feature 1..158: note = Synthetic nucleic acid
  source 1..158: mol_type = other DNA
cagacgacggccagtgtcgacatgcgcctggttcagctttctcgccattcaatagaacacttcttgcggcgatggttcctggctcttcgatcgaataatttctgggtaccacgatgcttgttttcaccacaagaaccaggatcctacggtcattcagc

SEQ ID NO: 2281 - DNA, 158 bp, synthetic construct
  misc_feature 1..158: note = Synthetic nucleic acid
  source 1..158: mol_type = other DNA
cagacgacggccagtgtcgacatggaattttctccccctctacagcgcgcgacgaacacttcttgcggcgatggttcctggctcttcgatcctgctgaaggcatggctcttaaaaaatcactgccggttacattggctggatcctacggtcattcagc

SEQ ID NO: 2282 - DNA, 158 bp, synthetic construct
  misc_feature 1..158: note = Synthetic nucleic acid
  source 1..158: mol_type = other DNA
cagacgacggccagtgtcgacatggacagattcccacgttctgattcaatcgtacaaccccgggctaacacttcttgcggcgatggttcctggctcttcgatctgatgttgttgcggatcttcggcaaccgccgttcgggatcctacggtcattcagc

SEQ ID NO: 2283 - DNA, 158 bp, synthetic construct
  misc_feature 1..158: note = Synthetic nucleic acid
  source 1..158: mol_type = other DNA
cagacgacggccagtgtcgacatggctaaactgaccaagcgcatgcgtgttatccgcgagaaaaacacttcttgcggcgatggttcctggctcttcgatccagttgaccaggctggcctgagcgcttctgtaaactgtggatcctacggtcattcagc

SEQ ID NO: 2284 - DNA, 158 bp, synthetic construct
  misc_feature 1..158: note = Synthetic nucleic acid
  source 1..158: mol_type = other DNA
cagacgacggccagtgtcgacatgtcatcgacaaatattgaacaagtgatgccggttaagctggaacacttcttgcggcgatggttcctggctcttcgatccgaagagaatcagccagatagcggagaggaagaaccaggatcctacggtcattcagc

SEQ ID NO: 2285 - DNA, 158 bp, synthetic construct
  misc_feature 1..158: note = Synthetic nucleic acid
  source 1..158: mol_type = other DNA
cagacgacggccagtgtcgacatgaaaacttgcataacaaagggaattgtgaccgtaagtttaacggcaatattaaacacttcttgcggcgatggttcctggctcttcgatccgccgcaactcaactgtaaatcgagtggatcctacggtcattcagc

SEQ ID NO: 2286 - DNA, 158 bp, synthetic construct
  misc_feature 1..158: note = Synthetic nucleic acid
  source 1..158: mol_type = other DNA
cagacgacggccagtgtcgacatgaataagatcctgttgcaatgcgacaacctgtgcaaacgctatcaggaaaacacttcttgcggcgatggttcctggctcttcgatccggaactgagcctgatgggggcggagcacggatcctacggtcattcagc

SEQ ID NO: 2287 - DNA, 158 bp, synthetic construct
  misc_feature 1..158: note = Synthetic nucleic acid
  source 1..158: mol_type = other DNA
cagacgacggccagtgtcgacatgacaaccttaagctgtaaagtgacctcggtagaagctatcacaacacttcttgcggcgatggttcctggctcttcgatcgatcgcctgtttggcgatgcgtttgcatttatccatggatcctacggtcattcagc

SEQ ID NO: 2288 - DNA, 158 bp, synthetic construct
  misc_feature 1..158: note = Synthetic nucleic acid
  source 1..158: mol_type = other DNA
cagacgacggccagtgtcgacatgacacaggcagaacgccgccatgaccggctggctaacacttcttgcggcgatggttcctggctcttcgatcattcactgcttacgtttgttccggccgacagcccaccggaacagggatcctacggtcattcagc

SEQ ID NO: 2289 - DNA, 158 bp, synthetic construct
  misc_feature 1..158: note = Synthetic nucleic acid
  source 1..158: mol_type = other DNA
cagacgacggccagtgtcgacatgattactacccgaactgccaggcagtgtggacaagcagactaaacacttcttgcggcgatggttcctggctcttcgatcccactgcgcgctttgctgatagatttgcctgtcagtggatcctacggtcattcagc

SEQ ID NO: 2290 - DNA, 158 bp, synthetic construct
  misc_feature 1..158: note = Synthetic nucleic acid
  source 1..158: mol_type = other DNA
cagacgacggccagtgtcgacatgggtcagaaagtacatcctaatggtattcgcctgggtattgtaaaaaacacttcttgcggcgatggttcctggctcttcgatcctaaaaagcagcagcgtaaaggccgtaaagagggatcctacggtcattcagc

SEQ ID NO: 2291 - DNA, 158 bp, synthetic construct
  misc_feature 1..158: note = Synthetic nucleic acid
  source 1..158: mol_type = other DNA
cagacgacggccagtgtcgacctgaacacaccggcacagctctctttgccactttataacacttcttgcggcgatggttcctggctcttcgatcgtaagctgaccattccgtttgtgaaagaaattctgaagttggtcggatcctacggtcattcagc

SEQ ID NO: 2292 - DNA, 158 bp, synthetic construct
  misc_feature 1..158: note = Synthetic nucleic acid
  source 1..158: mol_type = other DNA
cagacgacggccagtgtcgacgtgaaaaaactcatcacagcgaatgatattcgtgaagcacacgcgcgaacacttcttgcggcgatggttcctggctcttcgatcgtcgcctggccggctaactggcaatccctagtgggatcctacggtcattcagc

SEQ ID NO: 2293 - DNA, 158 bp, synthetic construct
  misc_feature 1..158: note = Synthetic nucleic acid
  source 1..158: mol_type = other DNA
cagacgacggccagtgtcgacatgaaaatcggcatcattggtgcaatggaagaagaagttacgctaacacttcttgcggcgatggttcctggctcttcgatcgttgagtcactggtgcagaaacttgcacatggccacggatcctacggtcattcagc

SEQ ID NO: 2294 - DNA, 158 bp, synthetic construct
  misc_feature 1..158: note = Synthetic nucleic acid
  source 1..158: mol_type = other DNA
cagacgacggccagtgtcgacatgaaacatgaccattttgttgttcaaagcccggataaacctgcaacacttcttgcggcgatggttcctggctcttcgatcaagcctggcgatgatgatgtgattgaaatgatgtggggatcctacggtcattcagc

SEQ ID NO: 2295 - DNA, 158 bp, synthetic construct
  misc_feature 1..158: note = Synthetic nucleic acid
  source 1..158: mol_type = other DNA
cagacgacggccagtgtcgacatgaccgaaaacgctgttctccagttacgcgccgaaacacttcttgcggcgatggttcctggctcttcgatccaacatctgggtagcatcacagcagaacagttagaaagcgttggtggatcctacggtcattcagc

SEQ ID NO: 2296 - DNA, 158 bp, synthetic construct
  misc_feature 1..158: note = Synthetic nucleic acid
  source 1..158: mol_type = other DNA
cagacgacggccagtgtcgacatgatcataaaaaaaagcggtggtcgctggcagctaagcaacacttcttgcggcgatggttcctggctcttcgatcgcgactatctgtatacgatgggggttagcgccagatttattggatcctacggtcattcagc

SEQ ID NO: 2297 - DNA, 158 bp, synthetic construct
  misc_feature 1..158: note = Synthetic nucleic acid
  source 1..158: mol_type = other DNA
cagacgacggccagtgtcgacatgcaaaaaaacgctgcgcatacttatgccatttccagcttaacacttcttgcggcgatggttcctggctcttcgatctggttgcagcgtttcttccttaacctgtcgccaatggacggatcctacggtcattcagc

SEQ ID NO: 2298 - DNA, 158 bp, synthetic construct
  misc_feature 1..158: note = Synthetic nucleic acid
  source 1..158: mol_type = other DNA
cagacgacggccagtgtcgacatggaaaatcaacctaagttgaatagcagtaaagaagtaatcgcgtttctggaacacttcttgcggcgatggttcctggctcttcgatctgtgcgcgcagaacacctggtgttcgctggatcctacggtcattcagc

SEQ ID NO: 2299 - DNA, 158 bp, synthetic construct
  misc_feature 1..158: note = Synthetic nucleic acid
  source 1..158: mol_type = other DNA
cagacgacggccagtgtcgacatgggaattttaaaaagtttatttacgctggggaaatcgtttatctcccaggaacacttcttgcggcgatggttcctggctcttcgatcaagactgcaacgccaacagggcgagagtggatcctacggtcattcagc

SEQ ID NO: 2300 - DNA, 158 bp, synthetic construct
  misc_feature 1..158: note = Synthetic nucleic acid
  source 1..158: mol_type = other DNA
cagacgacggccagtgtcgacatgttaaaactgactgatatcacctggctttaccaccatttgccgataacacttcttgcggcgatggttcctggctcttcgatcagtgcttcggcactattggggattacgggtattggatcctacggtcattcagc

SEQ ID NO: 2301 - DNA, 158 bp, synthetic construct
  misc_feature 1..158: note = Synthetic nucleic acid
  source 1..158: mol_type = other DNA
cagacgacggccagtgtcgacatgaaaatctccccctcgttaatgtgtatggatctgctgaaatttaaagaacaaacacttcttgcggcgatggttcctggctcttcgatcgtacagcctcatgcaaaaacagcactgggatcctacggtcattcagc

SEQ ID NO: 2302 - DNA, 158 bp, synthetic construct
  misc_feature 1..158: note = Synthetic nucleic acid
  source 1..158: mol_type = other DNA
cagacgacggccagtgtcgacatgaaacgtgctgtcgttgtgttcagtggaggtcaggattccaaacacttcttgcggcgatggttcctggctcttcgatcgatggcagcgatgaagcagaaaaccgggttgaggaccggatcctacggtcattcagc

SEQ ID NO: 2303 - DNA, 158 bp, synthetic construct
  misc_feature 1..158: note = Synthetic nucleic acid
  source 1..158: mol_type = other DNA
cagacgacggccagtgtcgacatgatctacttacgcaaagcaaatgaacgtggtcatgcaaatcatggaacacttcttgcggcgatggttcctggctcttcgatcgaagtgttactgttcgatctgccgccggttacaggatcctacggtcattcagc

SEQ ID NO: 2304 - DNA, 158 bp, synthetic construct
  misc_feature 1..158: note = Synthetic nucleic acid
  source 1..158: mol_type = other DNA
cagacgacggccagtgtcgacatgatggcgaatatctggtggtcattaccgctgacattgattaacacttcttgcggcgatggttcctggctcttcgatccgttccttttcccgattattctggcagtaatgggcggaggatcctacggtcattcagc

SEQ ID NO: 2305 - DNA, 158 bp, synthetic construct
  misc_feature 1..158: note = Synthetic nucleic acid
  source 1..158: mol_type = other DNA
cagacgacggccagtgtcgacatgcgaattctggctatcgataccgcgacagaggcctaacacttcttgcggcgatggttcctggctcttcgatcacgtaacaacgtcgcatggaagaaacttccgggcaaagaaaacggatcctacggtcattcagc

SEQ ID NO: 2306 - DNA, 158 bp, synthetic construct
  misc_feature 1..158: note = Synthetic nucleic acid
  source 1..158: mol_type = other DNA
cagacgacggccagtgtcgacatgcgacttgataaatttatcgcacagcaactcggcgttagaacacttcttgcggcgatggttcctggctcttcgatccgtccgttaactgaagaagaaattgccagcgtcgtcaagggatcctacggtcattcagc

SEQ ID NO: 2307 - DNA, 158 bp, synthetic construct
  misc_feature 1..158: note = Synthetic nucleic acid
  source 1..158: mol_type = other DNA
cagacgacggccagtgtcgacatgctgaagcgtttctttattaccggtacagacacttctgtagggaaaaaacacttcttgcggcgatggttcctggctcttcgatctgtgctggcggtagatagagtcacggtgaacggatcctacggtcattcagc

SEQ ID NO: 2308 - DNA, 158 bp, synthetic construct
  misc_feature 1..158: note = Synthetic nucleic acid
  source 1..158: mol_type = other DNA
cagacgacggccagtgtcgacatggacttacaacactggcaggcacagttcgaaaactggttaacacttcttgcggcgatggttcctggctcttcgatcgatcacaaggtgatagatgcgttttcatccgctggcttcggatcctacggtcattcagc

SEQ ID NO: 2309 - DNA, 158 bp, synthetic construct
  misc_feature 1..158: note = Synthetic nucleic acid
  source 1..158: mol_type = other DNA
cagacgacggccagtgtcgacatggataatcgaggcgaatttttgaataacgttgctcaggcaaacacttcttgcggcgatggttcctggctcttcgatccggtgaaagcggtgtatctgattattgaggattgtggcggatcctacggtcattcagc

SEQ ID NO: 2310 - DNA, 158 bp, synthetic construct
  misc_feature 1..158: note = Synthetic nucleic acid
  source 1..158: mol_type = other DNA
cagacgacggccagtgtcgacatgtcaaaacgaacattcgcggtgatattaaccttgttgtgtagcttaacacttcttgcggcgatggttcctggctcttcgatcagttccgggacagaaactcgtccactgcaagacggatcctacggtcattcagc

SEQ ID NO: 2311 - DNA, 158 bp, synthetic construct
  misc_feature 1..158: note = Synthetic nucleic acid
  source 1..158: mol_type = other DNA
cagacgacggccagtgtcgacatgtcaaacacgccaatcgagcttaaaggcagtagcttaacacttcttgcggcgatggttcctggctcttcgatccagttagtcgaaaacgctttgaccgttcaaccgttaaataatggatcctacggtcattcagc

SEQ ID NO: 2312 - DNA, 158 bp, synthetic construct
  misc_feature 1..158: note = Synthetic nucleic acid
  source 1..158: mol_type = other DNA
cagacgacggccagtgtcgacatgtccattgcggtaaccaccaccgatccgacaaataccggaacacttcttgcggcgatggttcctggctcttcgatcggcaccaccaccctcgacgaagtacggcagataattgtcggatcctacggtcattcagc

SEQ ID NO: 2313 - DNA, 158 bp, synthetic construct
  misc_feature 1..158: note = Synthetic nucleic acid
  source 1..158: mol_type = other DNA
cagacgacggccagtgtcgacatgtcccggtcagcgaaacctcaaaatggtcgccgccgaacacttcttgcggcgatggttcctggctcttcgatctaccgcttcggctggctggaggggaacaatggcaaatcgtggggatcctacggtcattcagc

SEQ ID NO: 2314 - DNA, 158 bp, synthetic construct
  misc_feature 1..158: note = Synthetic nucleic acid
  source 1..158: mol_type = other DNA
cagacgacggccagtgtcgacatgttagaagatctcaaacgccaggtattagaagccaacctggcgaacacttcttgcggcgatggttcctggctcttcgatcgtaagcatggcgcgaaggcatattacgggcagcccggatcctacggtcattcagc

SEQ ID NO: 2315 - DNA, 158 bp, synthetic construct
  misc_feature 1..158: note = Synthetic nucleic acid
  source 1..158: mol_type = other DNA
cagacgacggccagtgtcgacatgttagagcaactgaaagccgacgtgctggcggcgaatctaacacttcttgcggcgatggttcctggctcttcgatcctgcgtaagcatggggccaatgcctattacgggcagagtggatcctacggtcattcagc

SEQ ID NO: 2316 - DNA, 158 bp, synthetic construct
  misc_feature 1..158: note = Synthetic nucleic acid
  source 1..158: mol_type = other DNA
cagacgacggccagtgtcgacatgttcagaaaattagcagctgaatgttttggtactttctggcttgtttttaacacttcttgcggcgatggttcctggctcttcgatcaccggaccctgctggaaaagcgtgataacggatcctacggtcattcagc

SEQ ID NO: 2317 - DNA, 158 bp, synthetic construct
  misc_feature 1..158: note = Synthetic nucleic acid
  source 1..158: mol_type = other DNA
cagacgacggccagtgtcgacgtgaacagttttaacgaaggggtggtttcaccccttttgtctttaacacttcttgcggcgatggttcctggctcttcgatcttctgtcgctggcaacccaacgagaaaacgttctccggatcctacggtcattcagc

SEQ ID NO: 2318 - DNA, 158 bp, synthetic construct
  misc_feature 1..158: note = Synthetic nucleic acid
  source 1..158: mol_type = other DNA
cagacgacggccagtgtcgacgtgagcgaaattaaagacgttattgttcaggggttgtggaaaaacaaaacacttcttgcggcgatggttcctggctcttcgatcgcattgccaaacggtgaaacagggaatgtcgtcggatcctacggtcattcagc

SEQ ID NO: 2319 - DNA, 158 bp, synthetic construct
  misc_feature 1..158: note = Synthetic nucleic acid
  source 1..158: mol_type = other DNA
cagacgacggccagtgtcgacgtgataacgcgtgatttcttgatgaatgccgattgtaaaacggcatttaacacttcttgcggcgatggttcctggctcttcgatccggatggtgtgttacgtccgggattcgccaacggatcctacggtcattcagc

SEQ ID NO: 2320 - DNA, 158 bp, synthetic construct
  misc_feature 1..158: note = Synthetic nucleic acid
  source 1..158: mol_type = other DNA
cagacgacggccagtgtcgacatgaaaacaattggtttgctgggaggaatgagctgggaatccaaacacttcttgcggcgatggttcctggctcttcgatcccatgccgaggatgctgtcgcttttatgctgtcgggtggatcctacggtcattcagc

SEQ ID NO: 2321 - DNA, 158 bp, synthetic construct
  misc_feature 1..158: note = Synthetic nucleic acid
  source 1..158: mol_type = other DNA
cagacgacggccagtgtcgacatgaaggcgttcgatctccaccgtatggcatttgataaagtgccttttaacacttcttgcggcgatggttcctggctcttcgatccgaaggcaagtcgggcaaaacgggtgaccgccggatcctacggtcattcagc

SEQ ID NO: 2322 - DNA, 158 bp, synthetic construct
  misc_feature 1..158: note = Synthetic nucleic acid
  source 1..158: mol_type = other DNA
cagacgacggccagtgtcgacatgacgaccttaaccgctcgaccggaagccattaccttcgataacacttcttgcggcgatggttcctggctcttcgatcacgcgctttctcccacgtcctttgctcatatcgctgggggatcctacggtcattcagc

SEQ ID NO: 2323 - DNA, 158 bp, synthetic construct
  misc_feature 1..158: note = Synthetic nucleic acid
  source 1..158: mol_type = other DNA
cagacgacggccagtgtcgacatgcagtcaataacacctccattaattgccgttattggtagcgataacacttcttgcggcgatggttcctggctcttcgatcttacggattttatgaccgcgcgtggttatcactacggatcctacggtcattcagc

SEQ ID NO: 2324 - DNA, 158 bp, synthetic construct
  misc_feature 1..158: note = Synthetic nucleic acid
  source 1..158: mol_type = other DNA
cagacgacggccagtgtcgacatgccacatcacattgttattgttgaagatgagccggttaccaacacttcttgcggcgatggttcctggctcttcgatcatggtgaaggttatttcttagccgctgatgtgtgcagtggatcctacggtcattcagc

SEQ ID NO: 2325 - DNA, 158 bp, synthetic construct
  misc_feature 1..158: note = Synthetic nucleic acid
  source 1..158: mol_type = other DNA
cagacgacggccagtgtcgacatgcctttaagcgcacaacagttagctgcacagaaaaacctttcaacacttcttgcggcgatggttcctggctcttcgatcgcttgtcaggcgctgctacgctcacctgataaggaaggatcctacggtcattcagc

SEQ ID NO: 2326 - DNA, 158 bp, synthetic construct
  misc_feature 1..158: note = Synthetic nucleic acid
  source 1..158: mol_type = other DNA
cagacgacggccagtgtcgacatgctgcgcgcatttgcccgccttcttctccgtatttgtttttaacacttcttgcggcgatggttcctggctcttcgatcgccgtttagtgagcatggctgtccggcgcagaaatccggatcctacggtcattcagc

SEQ ID NO: 2327 - DNA, 158 bp, synthetic construct
  misc_feature 1..158: note = Synthetic nucleic acid
  source 1..158: mol_type = other DNA
cagacgacggccagtgtcgacgtgactgacatgaatatccttgatttgttcctgaaggctagccttctaacacttcttgcggcgatggttcctggctcttcgatcgcgtttaccgttagcgagagcaacaaggggcgaggatcctacggtcattcagc

SEQ ID NO: 2328 - DNA, 158 bp, synthetic construct
  misc_feature 1..158: note = Synthetic nucleic acid
  source 1..158: mol_type = other DNA
cagacgacggccagtgtcgacatgaacccaacacgttatgcacgcatctgcgaaatgctcgccagaacacttcttgcggcgatggttcctggctcttcgatcgccgactggtgggctactatgcaggctgcagggttcggatcctacggtcattcagc

SEQ ID NO: 2329 - DNA, 158 bp, synthetic construct
  misc_feature 1..158: note = Synthetic nucleic acid
  source 1..158: mol_type = other DNA
cagacgacggccagtgtcgacatgactctcaataaaaccgatcgcattgtcattacgctgggtaaaaacacttcttgcggcgatggttcctggctcttcgatcccagctcgacacgaaggttaaaggaaatcacaagcggatcctacggtcattcagc

SEQ ID NO: 2330 - DNA, 158 bp, synthetic construct
  misc_feature 1..158: note = Synthetic nucleic acid
  source 1..158: mol_type = other DNA
cagacgacggccagtgtcgacatgagcaaccaaggcgaataccccgaagataatcgggttggaacacttcttgcggcgatggttcctggctcttcgatcgccgccattgaagatgctgcgggggagataaaatcacgaggatcctacggtcattcagc

SEQ ID NO: 2331 - DNA, 158 bp, synthetic construct
  misc_feature 1..158: note = Synthetic nucleic acid
  source 1..158: mol_type = other DNA
cagacgacggccagtgtcgacatgatactgaccgatccagaatggcaggcagttttattaagcctgaaagtttcttccaacacttcttgcggcgatggttcctggctcttcgatcgccgtgaacgggcggggcgctgtggatcctacggtcattcagc

SEQ ID NO: 2332 - DNA, 158 bp, synthetic construct
  misc_feature 1..158: note = Synthetic nucleic acid
  source 1..158: mol_type = other DNA
cagacgacggccagtgtcgacatgcaacgggaaacggtctggttagtggaagatgagcaagggataaacacttcttgcggcgatggttcctggctcttcgatcatcgcggcatgggatatagcctgaggggcctgtcaggatcctacggtcattcagc

SEQ ID NO: 2333 - DNA, 158 bp, synthetic construct
  misc_feature 1..158: note = Synthetic nucleic acid
  source 1..158: mol_type = other DNA
cagacgacggccagtgtcgacatggaactgcttttattgagtaactcgacgctgccgggtaaagcctaacacttcttgcggcgatggttcctggctcttcgatcagcggttccgctggaagctggtcaccgttttgtgggatcctacggtcattcagc

SEQ ID NO: 2334 - DNA, 158 bp, synthetic construct
  misc_feature 1..158: note = Synthetic nucleic acid
  source 1..158: mol_type = other DNA
cagacgacggccagtgtcgacatggcgagacgtattctggtcgtagaagatgaagctccaattcaacacttcttgcggcgatggttcctggctcttcgatcgcgcggtacaggatatcgtttttcaacccgctttgtcggatcctacggtcattcagc

SEQ ID NO: 2335 - DNA, 158 bp, synthetic construct
  misc_feature 1..158: note = Synthetic nucleic acid
  source 1..158: mol_type = other DNA
cagacgacggccagtgtcgacatggctaacgaattaacctggcatgacgtgctggctgaaaacacttcttgcggcgatggttcctggctcttcgatccgattgactggatgccagtattaccggcagagagtgagacaggatcctacggtcattcagc

SEQ ID NO: 2336 - DNA, 158 bp, synthetic construct
  misc_feature 1..158: note = Synthetic nucleic acid
  source 1..158: mol_type = other DNA
cagacgacggccagtgtcgacatgtcccaacctcgcccactgctctctcctccaacacttcttgcggcgatggttcctggctcttcgatcaagaatttcaccagtgcactactggcccgtcattttctgatccagattggatcctacggtcattcagc

SEQ ID NO: 2337 - DNA, 158 bp, synthetic construct
  misc_feature 1..158: note = Synthetic nucleic acid
  source 1..158: mol_type = other DNA
cagacgacggccagtgtcgacatgtcgttacttgcacaactggatcaaaaaatcgctgctaacgaacacttcttgcggcgatggttcctggctcttcgatcgtggtacaacacagcgatgaaaaaggcggtgctacttggatcctacggtcattcagc

SEQ ID NO: 2338 - DNA, 158 bp, synthetic construct
  misc_feature 1..158: note = Synthetic nucleic acid
  source 1..158: mol_type = other DNA
cagacgacggccagtgtcgacatgaccgtcgaaacgcaacttaatcccacacagcctgtcaataacacttcttgcggcgatggttcctggctcttcgatctccgccaggaaaacagcgactggtttagcgaagaggcgggatcctacggtcattcagc

SEQ ID NO: 2339 - DNA, 158 bp, synthetic construct
  misc_feature 1..158: note = Synthetic nucleic acid
  source 1..158: mol_type = other DNA
cagacgacggccagtgtcgacatgcaaaagctaaaacagcaggtatttgaagccaacatggagaacacttcttgcggcgatggttcctggctcttcgatcgtaaacacggtcctaacgcttattacgggcagaaggtgggatcctacggtcattcagc

SEQ ID NO: 2340 - DNA, 158 bp, synthetic construct
  misc_feature 1..158: note = Synthetic nucleic acid
  source 1..158: mol_type = other DNA
cagacgacggccagtgtcgacatgccagcggaaaacattgttgaagttcatcatcttaagaagtccgtcgaacacttcttgcggcgatggttcctggctcttcgatcggtgaacgggcagttgcaggaggaagcacttggatcctacggtcattcagc

SEQ ID NO: 2341 - DNA, 158 bp, synthetic construct
  misc_feature 1..158: note = Synthetic nucleic acid
  source 1..158: mol_type = other DNA
cagacgacggccagtgtcgacatgcgtataacgattattctggtcgcacccgccaaacacttcttgcggcgatggttcctggctcttcgatcgttgcaccgtttgctgcatgatattgaaaaaaatatcaccaaactgggatcctacggtcattcagc

SEQ ID NO: 2342 - DNA, 158 bp, synthetic construct
  misc_feature 1..158: note = Synthetic nucleic acid
  source 1..158: mol_type = other DNA
cagacgacggccagtgtcgacatgtctgataatctgccgtggaaaacctggacgccggacgataacacttcttgcggcgatggttcctggctcttcgatcaagaactctgccgtctggcagcaccaggagtggtgtttggatcctacggtcattcagc

SEQ ID NO: 2343 - DNA, 158 bp, synthetic construct
  misc_feature 1..158: note = Synthetic nucleic acid
  source 1..158: mol_type = other DNA
cagacgacggccagtgtcgacatgttgtatgggttttcaggtgttattttacagggtgcgctcgtcaaacacttcttgcggcgatggttcctggctcttcgatcctactccgtgggtgtgaagagggctgacctgaaaggatcctacggtcattcagc

SEQ ID NO: 2344 - DNA, 158 bp, synthetic construct
  misc_feature 1..158: note = Synthetic nucleic acid
  source 1..158: mol_type = other DNA
cagacgacggccagtgtcgacatgaaactgttgattgtcgaagatgaaaagaaaaccggagaatacttgaccaaaaacacttcttgcggcgatggttcctggctcttcgatctgcttgaggtgccggatggtcaggcgggatcctacggtcattcagc

SEQ ID NO: 2345 - DNA, 158 bp, synthetic construct
  misc_feature 1..158: note = Synthetic nucleic acid
  source 1..158: mol_type = other DNA
cagacgacggccagtgtcgacatgacacaacaaggggatgctgtagccggggagctggcgaaacacttcttgcggcgatggttcctggctcttcgatccgaagaacgtcgcaacccaacgcaaggagcgcaagcaatgggatcctacggtcattcagc

SEQ ID NO: 2346 - DNA, 158 bp, synthetic construct
  misc_feature 1..158: note = Synthetic nucleic acid
  source 1..158: mol_type = other DNA
cagacgacggccagtgtcgacatgacggcaattgccccggttattaccattgatggcccaagcaacacttcttgcggcgatggttcctggctcttcgatccgctacaatacgcgcgccagaaattggctctcgcaattggatcctacggtcattcagc

SEQ ID NO: 2347 - DNA, 158 bp, synthetic construct
  misc_feature 1..158: note = Synthetic nucleic acid
  source 1..158: mol_type = other DNA
cagacgacggccagtgtcgacatgctaacagtaccgggattatgctggctatgccgaatgccactaacacttcttgcggcgatggttcctggctcttcgatcgctgtccaggtctggtgcctttgtcgaaccttgaccggatcctacggtcattcagc

SEQ ID NO: 2348 - DNA, 158 bp, synthetic construct
  misc_feature 1..158: note = Synthetic nucleic acid
  source 1..158: mol_type = other DNA
cagacgacggccagtgtcgacatgaaccccatcgtaattaatcggcttcaacggaagctgggctaaacacttcttgcggcgatggttcctggctcttcgatcgccgaacaggcgttgaaaaaactggagctggaagaaggatcctacggtcattcagc

SEQ ID NO: 2349 - DNA, 158 bp, synthetic construct
  misc_feature 1..158: note = Synthetic nucleic acid
  source 1..158: mol_type = other DNA
cagacgacggccagtgtcgacatgacagctccattaaccctattgatcgttgaggacgaaacgcaacacttcttgcggcgatggttcctggctcttcgatcagttggcagaccacaacgcatataccacagtgggctaggatcctacggtcattcagc

SEQ ID NO: 2350 - DNA, 158 bp, synthetic construct
  misc_feature 1..158: note = Synthetic nucleic acid
  source 1..158: mol_type = other DNA
cagacgacggccagtgtcgacatgattaacgtacaaaacgtcagtaaaaccttcatcctgcaccagcaaaaaacacttcttgcggcgatggttcctggctcttcgatccgcctgcacccaatgggagcctcttcactaggatcctacggtcattcagc

SEQ ID NO: 2351 - DNA, 158 bp, synthetic construct
  misc_feature 1..158: note = Synthetic nucleic acid
  source 1..158: mol_type = other DNA
cagacgacggccagtgtcgacatgattcagtatctgaacgtctttttttacgatatctacccgtacatttgtgcgaaacacttcttgcggcgatggttcctggctcttcgatctcaaattgtgcgttcgcggcgaaatggatcctacggtcattcagc

SEQ ID NO: 2352 - DNA, 158 bp, synthetic construct
  misc_feature 1..158: note = Synthetic nucleic acid
  source 1..158: mol_type = other DNA
cagacgacggccagtgtcgacatgaaacagtatttgattgccccctcaattctgtcggctaacacttcttgcggcgatggttcctggctcttcgatcatgaaatgcgcagtgaactggcaaaggtaagtcatgaatccggatcctacggtcattcagc

SEQ ID NO: 2353 - DNA, 158 bp, synthetic construct
  misc_feature 1..158: note = Synthetic nucleic acid
  source 1..158: mol_type = other DNA
cagacgacggccagtgtcgacatgaagtgggactggattttctttgatgccgatgaaacgctgtttaaacacttcttgcggcgatggttcctggctcttcgatcgcacgaactggagcagctcctgtgtaaacactgtggatcctacggtcattcagc

SEQ ID NO: 2354 - DNA, 158 bp, synthetic construct
  misc_feature 1..158: note = Synthetic nucleic acid
  source 1..158: mol_type = other DNA
cagacgacggccagtgtcgacatgagtgcgtcgttggcgatcctgaccatcggcattaacacttcttgcggcgatggttcctggctcttcgatcctaacgtattgattgcacggctggctgcggaattactggtgacgggatcctacggtcattcagc

SEQ ID NO: 2355 - DNA, 158 bp, synthetic construct
  misc_feature 1..158: note = Synthetic nucleic acid
  source 1..158: mol_type = other DNA
cagacgacggccagtgtcgacatgatgtaccacattcccggcgtgttatcgccaaacacttcttgcggcgatggttcctggctcttcgatctgcttaatctttatcataatctgctgcgggaatggtcggagatcggatcctacggtcattcagccgc

SEQ ID NO: 2356 - DNA, 158 bp, synthetic construct
  misc_feature 1..158: note = Synthetic nucleic acid
  source 1..158: mol_type = other DNA
cagacgacggccagtgtcgacatgcaattcctgaatatgttcttctttgatatctacccgtacatagccggggaacacttcttgcggcgatggttcctggctcttcgatcgtaccagctggtgcgcgctcgtcactttggatcctacggtcattcagc

SEQ ID NO: 2357 - DNA, 158 bp, synthetic construct
  misc_feature 1..158: note = Synthetic nucleic acid
  source 1..158: mol_type = other DNA
cagacgacggccagtgtcgacatgcaggaaaatagtcctttgcttcagctacaaaacgtaggatatctgaacacttcttgcggcgatggttcctggctcttcgatcaaatgcaggaagcacgctatgaactcgcacagggatcctacggtcattcagc

SEQ ID NO: 2358 - DNA, 158 bp, synthetic construct
  misc_feature 1..158: note = Synthetic nucleic acid
  source 1..158: mol_type = other DNA
cagacgacggccagtgtcgacatggaacacagccgaattaagaagagaaatgtcgcactcatagaaaaataacacttcttgcggcgatggttcctggctcttcgatccgaaacaagtaatgtgttgcatccctattcaggatcctacggtcattcagc

SEQ ID NO: 2359 - DNA, 158 bp, synthetic construct
  misc_feature 1..158: note = Synthetic nucleic acid
  source 1..158: mol_type = other DNA
cagacgacggccagtgtcgacatgttgcaacattattcagtgtcatggaaaaaaggactggctgcaaacacttcttgcggcgatggttcctggctcttcgatccgctggcaacggttacctttaaaatcgccgaaattggatcctacggtcattcagc

SEQ ID NO: 2360 - DNA, 158 bp, synthetic construct
  misc_feature 1..158: note = Synthetic nucleic acid
  source 1..158: mol_type = other DNA
cagacgacggccagtgtcgacgtgacaaacgttctgattgttgaagatgaacaggctattcgtcgaacacttcttgcggcgatggttcctggctcttcgatcactgaaaccggtattggctatcggtttatgcttgcaggatcctacggtcattcagc

SEQ ID NO: 2361 - DNA, 158 bp, synthetic construct
  misc_feature 1..158: note = Synthetic nucleic acid
  source 1..158: mol_type = other DNA
cagacgacggccagtgtcgacgtgagtaaacgttattttgtcaccggaacggataccgaagtgaacacttcttgcggcgatggttcctggctcttcgatccggcaaccggaaagtacataaaccttgccttgttggaaggatcctacggtcattcagc

SEQ ID NO: 2362 - DNA, 158 bp, synthetic construct
  misc_feature 1..158: note = Synthetic nucleic acid
  source 1..158: mol_type = other DNA
cagacgacggccagtgtcgacatgaaaacaatccatgacatccggcggtctaacgcaacacttcttgcggcgatggttcctggctcttcgatcgtgattttctcaggaaaaccaagaagatacaaaatcaaagccgcgggatcctacggtcattcagc

SEQ ID NO: 2363 - DNA, 158 bp, synthetic construct
  misc_feature 1..158: note = Synthetic nucleic acid
  source 1..158: mol_type = other DNA
cagacgacggccagtgtcgacatgagatcttatttgatcttgcggcttgctgggccaataacacttcttgcggcgatggttcctggctcttcgatcgaatggtatgtgattaaaggaggtatggatgtatctcagtccggatcctacggtcattcagc

SEQ ID NO: 2364 - DNA, 158 bp, synthetic construct
  misc_feature 1..158: note = Synthetic nucleic acid
  source 1..158: mol_type = other DNA
cagacgacggccagtgtcgacatgcgatatccggttgatgtatacacaggcaagattcaggcttataacacttcttgcggcgatggttcctggctcttcgatctcgaagatttttcccgccggttgtggggaaaagaaggatcctacggtcattcagc

SEQ ID NO: 2365 - DNA, 158 bp, synthetic construct
  misc_feature 1..158: note = Synthetic nucleic acid
  source 1..158: mol_type = other DNA
cagacgacggccagtgtcgacatgtacgagtttgactggagttccattgtcccttccctgaacacttcttgcggcgatggttcctggctcttcgatccgtcgttgttggtcagctacttgaaaagaaggacagcatacggatcctacggtcattcagc

SEQ ID NO: 2366 - DNA, 158 bp, synthetic construct
  misc_feature 1..158: note = Synthetic nucleic acid
  source 1..158: mol_type = other DNA
cagacgacggccagtgtcgacgtgcccgtccgcgccagtattgagccactaacaacacttcttgcggcgatggttcctggctcttcgatccaaagtggtgcgaatgtagaaagcaccgcgtactggttatacaggactggatcctacggtcattcagc

SEQ ID NO: 2367 - DNA, 158 bp, synthetic construct
  misc_feature 1..158: note = Synthetic nucleic acid
  source 1..158: mol_type = other DNA
cagacgacggccagtgtcgacatgaaacggacaaaatccatacgccacgcatcgttccgcaaaaaaacacttcttgcggcgatggttcctggctcttcgatcgcaaccggtacctcttctcgttcaatgggtggccccggatcctacggtcattcagc

SEQ ID NO: 2368 - DNA, 158 bp, synthetic construct
  misc_feature 1..158: note = Synthetic nucleic acid
  source 1..158: mol_type = other DNA
cagacgacggccagtgtcgacatgaataatcctgccatgacaatcaagggtgaacaggcgaaaaaaaacacttcttgcggcgatggttcctggctcttcgatctgattttgcaaggattatcgcaaaggagtttggcgggatcctacggtcattcagc

SEQ ID NO: 2369 - DNA, 158 bp, synthetic construct
  misc_feature 1..158: note = Synthetic nucleic acid
  source 1..158: mol_type = other DNA
cagacgacggccagtgtcgacatgacctggtctcgtcgccagtttctcaccggcgtaacacttcttgcggcgatggttcctggctcttcgatcaagctgtaccgcgtaccgtttaaatacggggaggtgagccaaaccggatcctacggtcattcagc

SEQ ID NO: 2370 - DNA, 158 bp, synthetic construct
  misc_feature 1..158: note = Synthetic nucleic acid
  source 1..158: mol_type = other DNA
cagacgacggccagtgtcgacatgcagtacccgattaacgagatgttccagaccctgaacacttcttgcggcgatggttcctggctcttcgatcggcgtttgtcgatgcaaacacataaatatctaaatattgcccgaggatcctacggtcattcagc

SEQ ID NO: 2371 - DNA, 158 bp, synthetic construct
  misc_feature 1..158: note = Synthetic nucleic acid
  source 1..158: mol_type = other DNA
cagacgacggccagtgtcgacatgcgcgtactggttgttgaagacaatgcgttgttacgtcaccaaacacttcttgcggcgatggttcctggctcttcgatcgttcgcggccagggctatctgttcgaattgcgcaagggatcctacggtcattcagc

SEQ ID NO: 2372 - DNA, 158 bp, synthetic construct
  misc_feature 1..158: note = Synthetic nucleic acid
  source 1..158: mol_type = other DNA
cagacgacggccagtgtcgacatggatctcgcgtcattacgcgctcaacaaatcgaactggcttaacacttcttgcggcgatggttcctggctcttcgatctccggcgttcgtgcgctatacagcaaatcagccctcgggatcctacggtcattcagc

SEQ ID NO: 2373 - DNA, 158 bp, synthetic construct
  misc_feature 1..158: note = Synthetic nucleic acid
  source 1..158: mol_type = other DNA
cagacgacggccagtgtcgacatgaaaaagcaccttctgcctctcgctctgctgttttcaacacttcttgcggcgatggttcctggctcttcgatcgttgcactttggcagggtgataagttcattcccgtgaaagcaggatcctacggtcattcagc

SEQ ID NO: 2374 - DNA, 158 bp, synthetic construct
  misc_feature 1..158: note = Synthetic nucleic acid
  source 1..158: mol_type = other DNA
cagacgacggccagtgtcgacatgaaaattctgattgttgaagacgatacgctgttattgcagggactaacacttcttgcggcgatggttcctggctcttcgatcggctatatgctggtcgcgaatgaggaaaacccaggatcctacggtcattcagc

SEQ ID NO: 2375 - DNA, 158 bp, synthetic construct
  misc_feature 1..158: note = Synthetic nucleic acid
  source 1..158: mol_type = other DNA
cagacgacggccagtgtcgacatgattcgctttgaacatgtcagcaaggcttatctcggtgggagaaacacttcttgcggcgatggttcctggctcttcgatcatggtcacttgcatggaggcgtgggccatgaagtgggatcctacggtcattcagc

SEQ ID NO: 2376 - DNA, 158 bp, synthetic construct
  misc_feature 1..158: note = Synthetic nucleic acid
  source 1..158: mol_type = other DNA
cagacgacggccagtgtcgacatgcaagaaagtatacaactggttattgattccttgccgttcctgctaacacttcttgcggcgatggttcctggctcttcgatccaacttaatcgccaggagagagaaccaaaaataggatcctacggtcattcagc

SEQ ID NO: 2377 - DNA, 158 bp, synthetic construct
  misc_feature 1..158: note = Synthetic nucleic acid
  source 1..158: mol_type = other DNA
cagacgacggccagtgtcgacatgcatatcaacattgcctggcaggacgtagataccgttctgctaacacttcttgcggcgatggttcctggctcttcgatcaatgactaccgccgcctgatcccctcgctaatgtccggatcctacggtcattcagc

SEQ ID NO: 2378 - DNA, 158 bp, synthetic construct
  misc_feature 1..158: note = Synthetic nucleic acid
  source 1..158: mol_type = other DNA
cagacgacggccagtgtcgacatgccatcactcagtaaagaagcggccctggttcatgaagcgttaaacacttcttgcggcgatggttcctggctcttcgatcacgagtttctgcgcgctgtgcgtcatcacaaccaaggatcctacggtcattcagc

SEQ ID NO: 2379 - DNA, 158 bp, synthetic construct
  misc_feature 1..158: note = Synthetic nucleic acid
  source 1..158: mol_type = other DNA
cagacgacggccagtgtcgacatgcgtaccacatcatttgcgaaagttgcagctttatgcgaacacttcttgcggcgatggttcctggctcttcgatcggcgaccgatgccaccatgtttgacgttaacaaaaaggagggatcctacggtcattcagc

SEQ ID NO: 2380 - DNA, 158 bp, synthetic construct
  misc_feature 1..158: note = Synthetic nucleic acid
  source 1..158: mol_type = other DNA
cagacgacggccagtgtcgacatgggtattttttctcgctttgccgacatcgtgaatgcaacacttcttgcggcgatggttcctggctcttcgatcctggcacaattaaaagccaaaatgaagcaagacaatcaagtgggatcctacggtcattcagc

SEQ ID NO: 2381 - DNA, 158 bp, synthetic construct
  misc_feature 1..158: note = Synthetic nucleic acid
  source 1..158: mol_type = other DNA
cagacgacggccagtgtcgacatgtcaaccccgcgtcagattcttgctgcaatttttgatatggataacacttcttgcggcgatggttcctggctcttcgatctgacagaactcaccgcaaaagaccttctcggtgttggatcctacggtcattcagc

SEQ ID NO: 2382 - DNA, 158 bp, synthetic construct
  misc_feature 1..158: note = Synthetic nucleic acid
  source 1..158: mol_type = other DNA
cagacgacggccagtgtcgacatgtccttcactcgacgcaaatttgttctggggatggaacacttcttgcggcgatggttcctggctcttcgatctcgccggttcggtcaacatttgattaaaaaggaaaatgtacgtggatcctacggtcattcagc

SEQ ID NO: 2383 - DNA, 158 bp, synthetic construct
  misc_feature 1..158: note = Synthetic nucleic acid
  source 1..158: mol_type = other DNA
cagacgacggccagtgtcgacatgtgtggacgctttgcccaatcccaaacgcgtaacacttcttgcggcgatggttcctggctcttcgatctgggtaatgttaaaaaccagggcgcggagttaattcaacctgttcgaggatcctacggtcattcagc

SEQ ID NO: 2384 - DNA, 158 bp, synthetic construct
  misc_feature 1..158: note = Synthetic nucleic acid
  source 1..158: mol_type = other DNA
cagacgacggccagtgtcgacatgtttgagtatttacccgaactgatgaaagggctacacaccagcctaacacttcttgcggcgatggttcctggctcttcgatccgcaaagcgctggcattcgaacggcgaaatagtggatcctacggtcattcagc

SEQ ID NO: 2385 - DNA, 158 bp, synthetic construct
  misc_feature 1..158: note = Synthetic nucleic acid
  source 1..158: mol_type = other DNA
cagacgacggccagtgtcgacgtgaaaaacaattcacagctgttgatgccgcgcgaaaaaatgaacacttcttgcggcgatggttcctggctcttcgatcgagagtatgtttcttttgccgaacgcggctggattgcgggatcctacggtcattcagc

SEQ ID NO: 2386 - DNA, 158 bp, synthetic construct
  misc_feature 1..158: note = Synthetic nucleic acid
  source 1..158: mol_type = other DNA
cagacgacggccagtgtcgacatgaaaacgggaccgttaaacgaaagtgagttggaatggctaacacttcttgcggcgatggttcctggctcttcgatcggtagtggtaagaaatttaagcagtgctgcctgcatttgggatcctacggtcattcagc

SEQ ID NO: 2387 - DNA, 158 bp, synthetic construct
  misc_feature 1..158: note = Synthetic nucleic acid
  source 1..158: mol_type = other DNA
cagacgacggccagtgtcgacatgaacgttttctcgcaaactcaacgctataaggcgttgttaacacttcttgcggcgatggttcctggctcttcgatcgcagataaatccgaaatcaacgctttgcaggcgagttatggatcctacggtcattcagc

SEQ ID NO: 2388 - DNA, 158 bp, synthetic construct
  misc_feature 1..158: note = Synthetic nucleic acid
  source 1..158: mol_type = other DNA
cagacgacggccagtgtcgacatgcctggaacgggaaaaatgaaacatgtcagtttgactctaacacttcttgcggcgatggttcctggctcttcgatccaaaatattgctattttataccagcaatacaatcgtaggggatcctacggtcattcagc

SEQ ID NO: 2389 - DNA, 158 bp, synthetic construct
  misc_feature 1..158: note = Synthetic nucleic acid
  source 1..158: mol_type = other DNA
cagacgacggccagtgtcgacatgtcccggatagaagcggtatttttcgactgcgacggtacaacacttcttgcggcgatggttcctggctcttcgatcgaactgtggaaagcgcgtggttgggatattacggcaactggatcctacggtcattcagc

SEQ ID NO: 2390 - DNA, 158 bp, synthetic construct
  misc_feature 1..158: note = Synthetic nucleic acid
  source 1..158: mol_type = other DNA
cagacgacggccagtgtcgacatgttagatttgtttaaagcaattggcctggggctggtgaacacttcttgcggcgatggttcctggctcttcgatcttattaacggcatcctggaaatcattaaaacgtaccatcccggatcctacggtcattcagc

SEQ ID NO: 2391 - DNA, 158 bp, synthetic construct
  misc_feature 1..158: note = Synthetic nucleic acid
  source 1..158: mol_type = other DNA
cagacgacggccagtgtcgacatgaaaacaaaattgatgacattacaagacgccaccggcttctttaacacttcttgcggcgatggttcctggctcttcgatctcgaccacatcatcgtttcacaggagagcaaaaacggatcctacggtcattcagc

SEQ ID NO: 2392 - DNA, 158 bp, synthetic construct
  misc_feature 1..158: note = Synthetic nucleic acid
  source 1..158: mol_type = other DNA
cagacgacggccagtgtcgacatgaaaaccggcatcgtgaccaccttgattgcattatgtttgaacacttcttgcggcgatggttcctggctcttcgatcctttcctgcagtgggcggaaaaacaaccatcttcctttggatcctacggtcattcagc

SEQ ID NO: 2393 - DNA, 158 bp, synthetic construct
  misc_feature 1..158: note = Synthetic nucleic acid
  source 1..158: mol_type = other DNA
cagacgacggccagtgtcgacatgaaagacatagatacactcatcagcaacaatgcactatggtcaaaaatgctaacacttcttgcggcgatggttcctggctcttcgatcaagctgaaacacgccaaccacaaagtgggatcctacggtcattcagc

SEQ ID NO: 2394 - DNA, 158 bp, synthetic construct
  misc_feature 1..158: note = Synthetic nucleic acid
  source 1..158: mol_type = other DNA
cagacgacggccagtgtcgacatgaccattacgtctctggatggctatcgctggctgaagaacaacacttcttgcggcgatggttcctggctcttcgatccaattcccattatccagcaggcgatggctggcaatgtcggatcctacggtcattcagc

SEQ ID NO: 2395 - DNA, 158 bp, synthetic construct
  misc_feature 1..158: note = Synthetic nucleic acid
  source 1..158: mol_type = other DNA
cagacgacggccagtgtcgacatgagccgaccacttctgcaactggccctcgaccactcatcacttaacacttcttgcggcgatggttcctggctcttcgatcaaatcgacgctatctggggaggtgcgcgtgcgcacggatcctacggtcattcagc

SEQ ID NO: 2396 - DNA, 158 bp, synthetic construct
  misc_feature 1..158: note = Synthetic nucleic acid
  source 1..158: mol_type = other DNA
cagacgacggccagtgtcgacatgatgttctggcgcattttccgtcttgagctgcgtgtagcgtttaacacttcttgcggcgatggttcctggctcttcgatccgacggcggcagcgttacgaatcagcattcaactcggatcctacggtcattcagc

SEQ ID NO: 2397 - DNA, 158 bp, synthetic construct
  misc_feature 1..158: note = Synthetic nucleic acid
  source 1..158: mol_type = other DNA
cagacgacggccagtgtcgacatggaactgtatctggacaccgctaacgtcgcagaagtcaacacttcttgcggcgatggttcctggctcttcgatcaacacgactggaatgccgcatttggcactactcatctccttggatcctacggtcattcagc

SEQ ID NO: 2398 - DNA, 158 bp, synthetic construct
  misc_feature 1..158: note = Synthetic nucleic acid
  source 1..158: mol_type = other DNA
cagacgacggccagtgtcgacatggaactgtatctggatacttcagacgttgttgcggtgaaggcgaacacttcttgcggcgatggttcctggctcttcgatcactggcagggagcgtttggcagaacgtcgatttttggatcctacggtcattcagc

SEQ ID NO: 2399 - DNA, 158 bp, synthetic construct
  misc_feature 1..158: note = Synthetic nucleic acid
  source 1..158: mol_type = other DNA
cagacgacggccagtgtcgacatggaacttttgacccaattgctgcaagccctgtaacacttcttgcggcgatggttcctggctcttcgatcttctctggtcgtgttatggaaaaagaaatatggaaatcggggggacggatcctacggtcattcagc

SEQ ID NO: 2400 - DNA, 158 bp, synthetic construct
  misc_feature 1..158: note = Synthetic nucleic acid
  source 1..158: mol_type = other DNA
cagacgacggccagtgtcgacatggattatacgctcacccgcatagatcccaacggtgagaaaacacttcttgcggcgatggttcctggctcttcgatcattgccgtaactaacctgcgtacacctgacgagattgtgggatcctacggtcattcagc

SEQ ID NO: 2401 - DNA, 158 bp, synthetic construct
  misc_feature 1..158: note = Synthetic nucleic acid
  source 1..158: mol_type = other DNA
cagacgacggccagtgtcgacatggcaaaaagaaccaaagccgaagctctgaagaccaacacttcttgcggcgatggttcctggctcttcgatctaacgaaattaattcatcaaacgaatgaattaagtgtcatgggtggatcctacggtcattcagc

SEQ ID NO: 2402 - DNA, 158 bp, synthetic construct
  misc_feature 1..158: note = Synthetic nucleic acid
  source 1..158: mol_type = other DNA
cagacgacggccagtgtcgacatggcttatcgcgaccaacctttaggtgaactggcgctctctattcctcgaacacttcttgcggcgatggttcctggctcttcgatcctgttcccacgcgcgctggcgggtgagttaggatcctacggtcattcagc

SEQ ID NO: 2403 - DNA, 158 bp, synthetic construct
  misc_feature 1..158: note = Synthetic nucleic acid
  source 1..158: mol_type = other DNA
cagacgacggccagtgtcgacatgttgcgcattatcgatacagaaacctgcggtttgcaaacacttcttgcggcgatggttcctggctcttcgatcgagctgcgtttaacactgaaacattatctggaaaatactcaaggatcctacggtcattcagc

SEQ ID NO: 2404 - DNA, 158 bp, synthetic construct
  misc_feature 1..158: note = Synthetic nucleic acid
  source 1..158: mol_type = other DNA
cagacgacggccagtgtcgacgtggcaagtaagtttcagaatcggttagtgggcacgatcgtaacacttcttgcggcgatggttcctggctcttcgatcggcttaagtggcgtggtaatgggctatacgccgaattacggatcctacggtcattcagc

SEQ ID NO: 2405 - DNA, 158 bp, synthetic construct
  misc_feature 1..158: note = Synthetic nucleic acid
  source 1..158: mol_type = other DNA
cagacgacggccagtgtcgacatgaaactgcaaggggtaattttcgatctggatggtgtaatcaccgataaacacttcttgcggcgatggttcctggctcttcgatcgcggttatcggccttctggcaaaacgtagagggatcctacggtcattcagc

SEQ ID NO: 2406 - DNA, 158 bp, synthetic construct
  misc_feature 1..158: note = Synthetic nucleic acid
  source 1..158: mol_type = other DNA
cagacgacggccagtgtcgacatgaagaaacgtgtttatcttattgccgccgtagtgagtggcaacacttcttgcggcgatggttcctggctcttcgatcaaaaccgccgtgtagaaattaccttaagcccgctgtgtggatcctacggtcattcagc

SEQ ID NO: 2407 - DNA, 158 bp, synthetic construct
  misc_feature 1..158: note = Synthetic nucleic acid
  source 1..158: mol_type = other DNA
cagacgacggccagtgtcgacatgacgcaggatgaattgaaaaaagcagtaggatgggcggaacacttcttgcggcgatggttcctggctcttcgatcgattggcacacctgacggtgtcaaaaccattgtgaaacgtggatcctacggtcattcagc

SEQ ID NO: 2408 - DNA, 158 bp, synthetic construct
  misc_feature 1..158: note = Synthetic nucleic acid
  source 1..158: mol_type = other DNA
cagacgacggccagtgtcgacatgagcgaacaaatcacgtttgccaccagcgattttgccagtaacaacacttcttgcggcgatggttcctggctcttcgatctgctggaagcgccaaaaggctggacgtcagtgtggggatcctacggtcattcagc

SEQ ID NO: 2409 - DNA, 158 bp, synthetic construct
  misc_feature 1..158: note = Synthetic nucleic acid
  source 1..158: mol_type = other DNA
cagacgacggccagtgtcgacatgagtgaatccgcgtttaaggattgctttttaacggatgtttcaaacacttcttgcggcgatggttcctggctcttcgatcacccggagaataaattctccgggatgatgcagtatggatcctacggtcattcagc

SEQ ID NO: 2410 - DNA, 158 bp, synthetic construct
  misc_feature 1..158: note = Synthetic nucleic acid
  source 1..158: mol_type = other DNA
cagacgacggccagtgtcgacatgcagtttgactggagtgccatctggcctgcaacacttcttgcggcgatggttcctggctcttcgatcctgagctttattctgcgtcgtctggaaagaaggatgaaaatcctgaggggatcctacggtcattcagc

SEQ ID NO: 2411 - DNA, 158 bp, synthetic construct
  misc_feature 1..158: note = Synthetic nucleic acid
  source 1..158: mol_type = other DNA
cagacgacggccagtgtcgacatgccagctttagatttgattcgaccgtctgtcaccgctatgcgaacacttcttgcggcgatggttcctggctcttcgatcctggaaatcgcgcgtaatccaatccagcgtgcggtgggatcctacggtcattcagc

SEQ ID NO: 2412 - DNA, 158 bp, synthetic construct
  misc_feature 1..158: note = Synthetic nucleic acid
  source 1..158: mol_type = other DNA
cagacgacggccagtgtcgacatgcgaattttactgatagaagatgacatgctgattggcgacgaacacttcttgcggcgatggttcctggctcttcgatccgtgcatggtattggttacacattaggtgagaaacggggatcctacggtcattcagc

SEQ ID NO: 2413 - DNA, 158 bp, synthetic construct
  misc_feature 1..158: note = Synthetic nucleic acid
  source 1..158: mol_type = other DNA
cagacgacggccagtgtcgacatgctgataataaaacgtagcgtggcgatcatcgcgataaacacttcttgcggcgatggttcctggctcttcgatcgcgttgttgatgcagatgggaatattcttataaacctgggaggatcctacggtcattcagc

SEQ ID NO: 2414 - DNA, 158 bp, synthetic construct
  misc_feature 1..158: note = Synthetic nucleic acid
  source 1..158: mol_type = other DNA
cagacgacggccagtgtcgacatggacctgatttatttcctcatcgattttatcctgcacattgacgtgcatctggcaaacacttcttgcggcgatggttcctggctcttcgatcctgcggcacgcgccgcaaaaagcggatcctacggtcattcagc

SEQ ID NO: 2415 - DNA, 158 bp, synthetic construct
  misc_feature 1..158: note = Synthetic nucleic acid
  source 1..158: mol_type = other DNA
cagacgacggccagtgtcgacatggatcgtattgttagttcttcacatgaccgtacatcactgcttagcaaacacttcttgcggcgatggttcctggctcttcgatcgagcattctgggcttcgctagccgcgattgtggatcctacggtcattcagc

SEQ ID NO: 2416 - DNA, 158 bp, synthetic construct
  misc_feature 1..158: note = Synthetic nucleic acid
  source 1..158: mol_type = other DNA
cagacgacggccagtgtcgacatggctaactggttaaatcaactgcaatccctgcttgggcaaaaacacttcttgcggcgatggttcctggctcttcgatccgatctcgaacagcaaaaacgcactttggcggaactaggatcctacggtcattcagc

SEQ ID NO: 2417 - DNA, 158 bp, synthetic construct
  misc_feature 1..158: note = Synthetic nucleic acid
  source 1..158: mol_type = other DNA
cagacgacggccagtgtcgacatggctgttattcaagatatcatcgctgcgctctggcaaaacacttcttgcggcgatggttcctggctcttcgatccgctgtttgtggtgattaaaaaaaaatactgtaacgccaatggatcctacggtcattcagc

SEQ ID NO: 2418 - DNA, 158 bp, synthetic construct
  misc_feature 1..158: note = Synthetic nucleic acid
  source 1..158: mol_type = other DNA
cagacgacggccagtgtcgacatggggatggaaaactacaatccaccgcaggaaccctaacacttcttgcggcgatggttcctggctcttcgatcgtatggcaatagtatgacgtttaaagcgccagcggattttcgtggatcctacggtcattcagc

SEQ ID NO: 2419 - DNA, 158 bp, synthetic construct
  misc_feature 1..158: note = Synthetic nucleic acid
  source 1..158: mol_type = other DNA
cagacgacggccagtgtcgacatggttcagaagcccctcattaagcagggatattcactggaacacttcttgcggcgatggttcctggctcttcgatcccactttctggcgatctatttgtatattgggcaggcgaagggatcctacggtcattcagc

SEQ ID NO: 2420 - DNA, 158 bp, synthetic construct
  misc_feature 1..158: note = Synthetic nucleic acid
  source 1..158: mol_type = other DNA
cagacgacggccagtgtcgacatgtatcaacatcacaactggcaaggtgcgctgctgaacacttcttgcggcgatggttcctggctcttcgatccagtcactttcgatgggcattctttgacaactcgcgttttgggaggatcctacggtcattcagc

SEQ ID NO: 2421 - DNA, 158 bp, synthetic construct
  misc_feature 1..158: note = Synthetic nucleic acid
  source 1..158: mol_type = other DNA
cagacgacggccagtgtcgacatgtctggttttttccagcgtctgtttggcaaggataataagcaacacttcttgcggcgatggttcctggctcttcgatccgatatcccgctgacatcacttcatattattggtttcggatcctacggtcattcagc

SEQ ID NO: 2422 - DNA, 158 bp, synthetic construct
  misc_feature 1..158: note = Synthetic nucleic acid
  source 1..158: mol_type = other DNA
cagacgacggccagtgtcgacgtgaaagagattattgatggattccttaaattccagcgcgaggcatttccgaagaacacttcttgcggcgatggttcctggctcttcgatccgctacgccaaccgaccgcagcgggaggatcctacggtcattcagc

SEQ ID NO: 2423 - DNA, 158 bp, synthetic construct
  misc_feature 1..158: note = Synthetic nucleic acid
  source 1..158: mol_type = other DNA
cagacgacggccagtgtcgacatgaaacagcctgcgcccgtttatcagagaattgcgggtaacacttcttgcggcgatggttcctggctcttcgatcctgtctttgggggcgaactgactcttgtgcaattgcaagcgggatcctacggtcattcagc

SEQ ID NO: 2424 - DNA, 158 bp, synthetic construct
  misc_feature 1..158: note = Synthetic nucleic acid
  source 1..158: mol_type = other DNA
cagacgacggccagtgtcgacatgccatctacacgctatcaaaaaatcaatgcccatcactatcgaacacttcttgcggcgatggttcctggctcttcgatcaacagcgggcggctgtcattttataaaataaagcgtggatcctacggtcattcagc

SEQ ID NO: 2425 - DNA, 158 bp, synthetic construct
  misc_feature 1..158: note = Synthetic nucleic acid
  source 1..158: mol_type = other DNA
cagacgacggccagtgtcgacatgtcgttctggaaagttgcagcagcgcaatatgagcaacacttcttgcggcgatggttcctggctcttcgatcttcatcacagggttggcaaggcgatatcattccattacgcaggggatcctacggtcattcagc

SEQ ID NO: 2426 - DNA, 158 bp, synthetic construct
  misc_feature 1..158: note = Synthetic nucleic acid
  source 1..158: mol_type = other DNA
cagacgacggccagtgtcgacatgtctgataacgacgaattgcagcaaatcgcgcatctgaacacttcttgcggcgatggttcctggctcttcgatcgtgaaaatgatgcgtggaagattgatcgtcttgcacccaccggatcctacggtcattcagc

SEQ ID NO: 2427 - DNA, 158 bp, synthetic construct
  misc_feature 1..158: note = Synthetic nucleic acid
  source 1..158: mol_type = other DNA
cagacgacggccagtgtcgacgtgcaacgagcgcgttgttatctgataggtgaaacggcggtaaacacttcttgcggcgatggttcctggctcttcgatcgcgtgcgctttgtaccgcagaaggagggagtatgcagcggatcctacggtcattcagc

SEQ ID NO: 2428 - DNA, 158 bp, synthetic construct
  misc_feature 1..158: note = Synthetic nucleic acid
  source 1..158: mol_type = other DNA
cagacgacggccagtgtcgacttgatcaacgttctacttgttgatgaccacgaactggtgcaacacttcttgcggcgatggttcctggctcttcgatcccatggtctgtgtaatgcggagacattatcaagtcagtcaggatcctacggtcattcagc

SEQ ID NO: 2429 - DNA, 158 bp, synthetic construct
  misc_feature 1..158: note = Synthetic nucleic acid
  source 1..158: mol_type = other DNA
cagacgacggccagtgtcgacatgaagaaaattggcgtaattctgagcggatgcggcgtctatgacgaacacttcttgcggcgatggttcctggctcttcgatcgctggtttcccgcgtgctggttctggctgaaggtggatcctacggtcattcagc

SEQ ID NO: 2430 - DNA, 158 bp, synthetic construct
  misc_feature 1..158: note = Synthetic nucleic acid
  source 1..158: mol_type = other DNA
cagacgacggccagtgtcgacatgaatcagacgctactttcctcttttggtacgcctttcgaacgtaacacttcttgcggcgatggttcctggctcttcgatccataccgtcaggcacatgagcgtaaagccagcgatggatcctacggtcattcagc

SEQ ID NO: 2431 - DNA, 158 bp, synthetic construct
  misc_feature 1..158: note = Synthetic nucleic acid
  source 1..158: mol_type = other DNA
cagacgacggccagtgtcgacatgagtaagtcgaaaatgattgtgcgcaccaaatttattgatcgcgaacacttcttgcggcgatggttcctggctcttcgatcagaagcgaaaaaagagagtgaagaagggataaagggatcctacggtcattcagc

SEQ ID NO: 2432 - DNA, 158 bp, synthetic construct
  misc_feature 1..158: note = Synthetic nucleic acid
  source 1..158: mol_type = other DNA
cagacgacggccagtgtcgacatgctctgcgtgaaaaatgtttcgctacgtttaccagaaagcaacacttcttgcggcgatggttcctggctcttcgatctggcgcagtggtcagaaaattacaacaaactgcgatcgggatcctacggtcattcagc

SEQ ID NO: 2433 - DNA, 158 bp, synthetic construct
  misc_feature 1..158: note = Synthetic nucleic acid
  source 1..158: mol_type = other DNA
cagacgacggccagtgtcgacatggatatcatttctgtcgccttaaagcgtcattccactaaggcatttaacacttcttgcggcgatggttcctggctcttcgatctgccgcaaaacatcaccttaaccgaagtgtatggatcctacggtcattcagc

SEQ ID NO: 2434 - DNA, 158 bp, synthetic construct
  misc_feature 1..158: note = Synthetic nucleic acid
  source 1..158: mol_type = other DNA
cagacgacggccagtgtcgacatgtctgagccgatgatgtggctgctggttcgtggcgtatgggaaaaacacttcttgcggcgatggttcctggctcttcgatccgaccgcatcgtccgggctgtcactcgcaaggcgggatcctacggtcattcagc

SEQ ID NO: 2435 - DNA, 158 bp, synthetic construct
  misc_feature 1..158: note = Synthetic nucleic acid
  source 1..158: mol_type = other DNA
cagacgacggccagtgtcgacatgaacaatatgaacgtaattattgccgatgaccatccgatagtcttgttcgaacacttcttgcggcgatggttcctggctcttcgatcgaccttaagtccggcagataaagacatcggatcctacggtcattcagc

SEQ ID NO: 2436 - DNA, 158 bp, synthetic construct
  misc_feature 1..158: note = Synthetic nucleic acid
  source 1..158: mol_type = other DNA
cagacgacggccagtgtcgacatgaccggttctatgatcgtaaataatctggcgggactgatgatgctaacacttcttgcggcgatggttcctggctcttcgatcgacgtgaacaacttgaccgcgctgaagggagacggatcctacggtcattcagc

SEQ ID NO: 2437 - DNA, 158 bp, synthetic construct
  misc_feature 1..158: note = Synthetic nucleic acid
  source 1..158: mol_type = other DNA
cagacgacggccagtgtcgacatgagtaatcaggaaccggctactatcctgctgattgacgatcacaacacttcttgcggcgatggttcctggctcttcgatccagcggtatgggtgcatcaggagcgcattttccgaggatcctacggtcattcagc

SEQ ID NO: 2438 - DNA, 158 bp, synthetic construct
  misc_feature 1..158: note = Synthetic nucleic acid
  source 1..158: mol_type = other DNA
cagacgacggccagtgtcgacatgcagaaagaacaactttccgctttaatggatggcgaaacaacacttcttgcggcgatggttcctggctcttcgatcgtgccaggaattcaaactttaggaacgcaatcgcagagcggatcctacggtcattcagc

SEQ ID NO: 2439 - DNA, 158 bp, synthetic construct
  misc_feature 1..158: note = Synthetic nucleic acid
  source 1..158: mol_type = other DNA
cagacgacggccagtgtcgacatggatgcgaaacaacgtattgcgcgccgtgtggcaacacttcttgcggcgatggttcctggctcttcgatctttgaagtcgccgccgatctgaatacgcaacggggtgatttaatcggatcctacggtcattcagc

SEQ ID NO: 2440 - DNA, 158 bp, synthetic construct
  misc_feature 1..158: note = Synthetic nucleic acid
  source 1..158: mol_type = other DNA
cagacgacggccagtgtcgacatggcagtttcagcaaagtacgacgaatttaatcactggtgggaacacttcttgcggcgatggttcctggctcttcgatcctgggagcaggtgaaagcgtattactacgccatgctaggatcctacggtcattcagc

SEQ ID NO: 2441 - DNA, 158 bp, synthetic construct
  misc_feature 1..158: note = Synthetic nucleic acid
  source 1..158: mol_type = other DNA
cagacgacggccagtgtcgacatgtcattaccgatgttgcaagtcgcgctggacaaccagaaacacttcttgcggcgatggttcctggctcttcgatcacgtcagttcaaacgttccatcgctgaactgtggggcagaggatcctacggtcattcagc

SEQ ID NO: 2442 - DNA, 158 bp, synthetic construct
  misc_feature 1..158: note = Synthetic nucleic acid
  source 1..158: mol_type = other DNA
cagacgacggccagtgtcgacatgttggatctgtttgccgatgctgaaccgtggcaaaacacttcttgcggcgatggttcctggctcttcgatcgccgctacaacctgacattccgtcaggcaggtaaaaaagaagcgggatcctacggtcattcagc

SEQ ID NO: 2443 - DNA, 158 bp, synthetic construct
  misc_feature 1..158: note = Synthetic nucleic acid
  source 1..158: mol_type = other DNA
cagacgacggccagtgtcgacgtgcggtgcaaaggttttctgtttgatcttgatggaacgaacacttcttgcggcgatggttcctggctcttcgatcctgtgaccaaacagccaaatggcgatgttattattcagccaggatcctacggtcattcagc

SEQ ID NO: 2444 - DNA, 158 bp, synthetic construct
  misc_feature 1..158: note = Synthetic nucleic acid
  source 1..158: mol_type = other DNA
cagacgacggccagtgtcgacttggcgattcgtctttacaaactggctgttgctttaggtaacacttcttgcggcgatggttcctggctcttcgatctgagtagcgaagaagtggtcgaggaaatgatgtctcatgtgggatcctacggtcattcagc

SEQ ID NO: 2445 - DNA, 158 bp, synthetic construct
  misc_feature 1..158: note = Synthetic nucleic acid
  source 1..158: mol_type = other DNA
cagacgacggccagtgtcgacatgaaatatcaacttactgcccttgaagctcgcgtgattggttgaacacttcttgcggcgatggttcctggctcttcgatccgtcttgattcgttgctggcccatctgggagatgaaggatcctacggtcattcagc

SEQ ID NO: 2446 - DNA, 158 bp, synthetic construct
  misc_feature 1..158: note = Synthetic nucleic acid
  source 1..158: mol_type = other DNA
cagacgacggccagtgtcgacatgaactatcgtattattccggtcaccgcattctcccagaactgttaacacttcttgcggcgatggttcctggctcttcgatctcccttcctgcaagacgaaatgcccgtctggcatggatcctacggtcattcagc

SEQ ID NO: 2447 - DNA, 158 bp, synthetic construct
  misc_feature 1..158: note = Synthetic nucleic acid
  source 1..158: mol_type = other DNA
cagacgacggccagtgtcgacatgacagcagaatttattatacgtcttatactcgcggcaattgcctaacacttcttgcggcgatggttcctggctcttcgatctatggcaggggtgaaaggcgtttcaattagcctcggatcctacggtcattcagc

SEQ ID NO: 2448 - DNA, 158 bp, synthetic construct
  misc_feature 1..158: note = Synthetic nucleic acid
  source 1..158: mol_type = other DNA
cagacgacggccagtgtcgacatgatcgatctctatttcgccccgacacccaatggtcaaacacttcttgcggcgatggttcctggctcttcgatcctgctaaaagcacaactcggtgatgagcgttcggatagtaaaggatcctacggtcattcagc

SEQ ID NO: 2449 - DNA, 158 bp, synthetic construct
  misc_feature 1..158: note = Synthetic nucleic acid
  source 1..158: mol_type = other DNA
cagacgacggccagtgtcgacatgcctgaagcaacaccttttcaggtgatgattgtggatgatcatcaacacttcttgcggcgatggttcctggctcttcgatccattctgttcctgcaacaacgcggggcacaaacgggatcctacggtcattcagc

SEQ ID NO: 2450 - DNA, 158 bp, synthetic construct
  misc_feature 1..158: note = Synthetic nucleic acid
  source 1..158: mol_type = other DNA
cagacgacggccagtgtcgacatggaacgaaataaacttgctcgtcagattattgacacttgcctgaacacttcttgcggcgatggttcctggctcttcgatcaattcaaaacctatgggttacgaattgaagagtcaggatcctacggtcattcagc

SEQ ID NO: 2451 - DNA, 158 bp, synthetic construct
  misc_feature 1..158: note = Synthetic nucleic acid
  source 1..158: mol_type = other DNA
cagacgacggccagtgtcgacatggcacgaaaaaccaaacaagaagcgcaagaaacgcgccaaaacacttcttgcggcgatggttcctggctcttcgatctgtgccccacgcttcgtaatcctgccactaacgaaacgggatcctacggtcattcagc

SEQ ID NO: 2452 - DNA, 158 bp, synthetic construct
  misc_feature 1..158: note = Synthetic nucleic acid
  source 1..158: mol_type = other DNA
cagacgacggccagtgtcgacatgggcgtaagagcgcaacaaaaagaaaaaacccgcaacacttcttgcggcgatggttcctggctcttcgatcaagagaaaaccgcaattattccgggaaatgtgaaggacgagcggggatcctacggtcattcagc

SEQ ID NO: 2453 - DNA, 158 bp, synthetic construct
  misc_feature 1..158: note = Synthetic nucleic acid
  source 1..158: mol_type = other DNA
cagacgacggccagtgtcgacatgggtaagatgaaccatcaggatgaattgccgttagcgaaagtaacacttcttgcggcgatggttcctggctcttcgatcgaatggttcgaggtagagcagtttcagaaccccttgggatcctacggtcattcagc

SEQ ID NO: 2454 - DNA, 158 bp, synthetic construct
  misc_feature 1..158: note = Synthetic nucleic acid
  source 1..158: mol_type = other DNA
cagacgacggccagtgtcgacatgtccgataacgctcaacttaccggtctgtgcgaccgttttcgtggtttttataacacttcttgcggcgatggttcctggctcttcgatccgctatctgccgccgaagaggtgttcggatcctacggtcattcagc

SEQ ID NO: 2455 - DNA, 158 bp, synthetic construct
  misc_feature 1..158: note = Synthetic nucleic acid
  source 1..158: mol_type = other DNA
cagacgacggccagtgtcgacatgttacaggtatacctagtccgccacggtgaaacgcagtggaacaacacttcttgcggcgatggttcctggctcttcgatctggacgcccctgcattagatgagctgcagcgtcctggatcctacggtcattcagc

SEQ ID NO: 2456 - DNA, 158 bp, synthetic construct
  misc_feature 1..158: note = Synthetic nucleic acid
  source 1..158: mol_type = other DNA
cagacgacggccagtgtcgacgtgaagctatacatttacgatcactgcccttactgcctcaaagcaacacttcttgcggcgatggttcctggctcttcgatcacacaaatcaatttgttatcatcaatggcgatttgtggatcctacggtcattcagc

SEQ ID NO: 2457 - DNA, 158 bp, synthetic construct
  misc_feature 1..158: note = Synthetic nucleic acid
  source 1..158: mol_type = other DNA
cagacgacggccagtgtcgacatgagtaaacccgctatcacgctttggtcagatgcccactttttaacacttcttgcggcgatggttcctggctcttcgatccgttttattgcactttcggcgaagcaatctggcctgggatcctacggtcattcagc

SEQ ID NO: 2458 - DNA, 158 bp, synthetic construct
  misc_feature 1..158: note = Synthetic nucleic acid
  source 1..158: mol_type = other DNA
cagacgacggccagtgtcgacatgatgcaaccatcaatcaaacctgctgacgagcattaacacttcttgcggcgatggttcctggctcttcgatctcaggatcaggtggacgatttgttggatagtcttggatttgacggatcctacggtcattcagc

SEQ ID NO: 2459 - DNA, 158 bp, synthetic construct
  misc_feature 1..158: note = Synthetic nucleic acid
  source 1..158: mol_type = other DNA
cagacgacggccagtgtcgacatgcgtatcattctgcttggcgctccgggcgcggaacacttcttgcggcgatggttcctggctcttcgatcgccggttgctgaagttcgcgctgatctggaaaaaatcctcggccggggatcctacggtcattcagc

SEQ ID NO: 2460 - DNA, 158 bp, synthetic construct
  misc_feature 1..158: note = Synthetic nucleic acid
  source 1..158: mol_type = other DNA
cagacgacggccagtgtcgacatggctcgcacaaaactgaaattccggctgcatcggaacacttcttgcggcgatggttcctggctcttcgatcgcaaaccggtgccggaagaggaagaaagcgagaaaaaagagataggatcctacggtcattcagc

SEQ ID NO: 2461 - DNA, 158 bp, synthetic construct
  misc_feature 1..158: note = Synthetic nucleic acid
  source 1..158: mol_type = other DNA
cagacgacggccagtgtcgacgtgcgccctcttattttatcgattttcgcactatttcttgcgaacacttcttgcggcgatggttcctggctcttcgatcttcccgtagaaatgacgtttcttaaacccgcaccagcaggatcctacggtcattcagc

SEQ ID NO: 2462 - DNA, 158 bp, synthetic construct
  misc_feature 1..158: note = Synthetic nucleic acid
  source 1..158: mol_type = other DNA
cagacgacggccagtgtcgacatgaaaaactggaaaacaagtgcagaatcaatcctgaccaccggccaacacttcttgcggcgatggttcctggctcttcgatcggcgcgtgaagctgtagaaggcgctaagctgcacggatcctacggtcattcagc

SEQ ID NO: 2463 - DNA, 158 bp, synthetic construct
  misc_feature 1..158: note = Synthetic nucleic acid
  source 1..158: mol_type = other DNA
cagacgacggccagtgtcgacatgaaaccatatcagcgccagtttattgaatttgcgcttagcaagaacacttcttgcggcgatggttcctggctcttcgatccggttaaggcctatcgcgaagagtttggcgttgcaggatcctacggtcattcagc

SEQ ID NO: 2464 - DNA, 158 bp, synthetic construct
  misc_feature 1..158: note = Synthetic nucleic acid
  source 1..158: mol_type = other DNA
cagacgacggccagtgtcgacatgaaatctttacaggctctgtttggcggcacctttgataacacttcttgcggcgatggttcctggctcttcgatccggtactgacttacattaaccaacaaggcttgtatcgcctcggatcctacggtcattcagc

SEQ ID NO: 2465 - DNA, 158 bp, synthetic construct
  misc_feature 1..158: note = Synthetic nucleic acid
  source 1..158: mol_type = other DNA
cagacgacggccagtgtcgacatgacaaaaatgagtcgctacgccttgattaccgcgctaacacttcttgcggcgatggttcctggctcttcgatcgaaattatctggtcaggtaaaggtgccgtttcgcagcaactaggatcctacggtcattcagc

SEQ ID NO: 2466 - DNA, 158 bp, synthetic construct
  misc_feature 1..158: note = Synthetic nucleic acid
  source 1..158: mol_type = other DNA
cagacgacggccagtgtcgacatgactgatcagtctcatcagtgcgtcattatcggtatcgctaacacttcttgcggcgatggttcctggctcttcgatcatatattgaaagcgaaaataagtcagttctttgaaaatggatcctacggtcattcagc

SEQ ID NO: 2467 - DNA, 158 bp, synthetic construct
  misc_feature 1..158: note = Synthetic nucleic acid
  source 1..158: mol_type = other DNA
cagacgacggccagtgtcgacatgccccctcgcgccctgttactggtcgatttacaaaataacacttcttgcggcgatggttcctggctcttcgatccgctatatacgctggcagactgggaagagacacagggggtgggatcctacggtcattcagc

SEQ ID NO: 2468 - DNA, 158 bp, synthetic construct
  misc_feature 1..158: note = Synthetic nucleic acid
  source 1..158: mol_type = other DNA
cagacgacggccagtgtcgacatgcgcagtaagtatatcgtcattgaggggctggaaggcgcaaacacttcttgcggcgatggttcctggctcttcgatcctaccgtgacccactgggtgaaggagttggacgcaaggggatcctacggtcattcagc

SEQ ID NO: 2469 - DNA, 158 bp, synthetic construct
  misc_feature 1..158: note = Synthetic nucleic acid
  source 1..158: mol_type = other DNA
cagacgacggccagtgtcgacatgtttacggggattgtacagggcaccgcaaaactggtaacacttcttgcggcgatggttcctggctcttcgatcgcacgagaaaatgccatgaatcaaccaggcacagaagccgaaggatcctacggtcattcagc

SEQ ID NO: 2470 - DNA, 158 bp, synthetic construct
  misc_feature 1..158: note = Synthetic nucleic acid
  source 1..158: mol_type = other DNA
cagacgacggccagtgtcgacgtggcaaagaattactatgacatcaccctcgccctggaacacttcttgcggcgatggttcctggctcttcgatctcaggcaaaacaaattcttgctcatttaaccccggagttgaagggatcctacggtcattcagc

SEQ ID NO: 2471 - DNA, 158 bp, synthetic construct
  misc_feature 1..158: note = Synthetic nucleic acid
  source 1..158: mol_type = other DNA
cagacgacggccagtgtcgacttgtatcaggataaaattcttgtccgccagctcggtcttcaaacacttcttgcggcgatggttcctggctcttcgatcctactaaacaatccggacttcgaatatattaccgctaagggatcctacggtcattcagc

SEQ ID NO: 2472 - DNA, 158 bp, synthetic construct
  misc_feature 1..158: note = Synthetic nucleic acid
  source 1..158: mol_type = other DNA
cagacgacggccagtgtcgacatgaaaaagttaacagtggcggctttggcagtaacaactcttaacacttcttgcggcgatggttcctggctcttcgatccgtgggtgtttatgttctcagcaggatatcgttttggcggatcctacggtcattcagc

SEQ ID NO: 2473 - DNA, 158 bp, synthetic construct
  misc_feature 1..158: note = Synthetic nucleic acid
  source 1..158: mol_type = other DNA
cagacgacggccagtgtcgacatgaatattgtggtgcttatttccggcaacggaagtaatttacaggcaattattaacacttcttgcggcgatggttcctggctcttcgatccgcagggctacgctgccgacgagtacggatcctacggtcattcagc

SEQ ID NO: 2474 - DNA, 158 bp, synthetic construct
  misc_feature 1..158: note = Synthetic nucleic acid
  source 1..158: mol_type = other DNA
cagacgacggccagtgtcgacatgacgcaaggcgcagtgaaaacaacgggtaaacgttaacacttcttgcggcgatggttcctggctcttcgatcaaacgtgcagcggattattattgaggggattcgaccacgtggcggatcctacggtcattcagc

SEQ ID NO: 2475 - DNA, 158 bp, synthetic construct
  misc_feature 1..158: note = Synthetic nucleic acid
  source 1..158: mol_type = other DNA
cagacgacggccagtgtcgacatgagcgatttcgcaaaagtagagcagtctttgcgagaaacacttcttgcggcgatggttcctggctcttcgatccgttatctgaccgcaggtgaaattgcggaattaaggagtcatggatcctacggtcattcagc

SEQ ID NO: 2476 - DNA, 158 bp, synthetic construct
  misc_feature 1..158: note = Synthetic nucleic acid
  source 1..158: mol_type = other DNA
cagacgacggccagtgtcgacatgagtttatttgataaaaagcatctggtttcccccgccgatgccctgaacacttcttgcggcgatggttcctggctcttcgatcgaattggcgtctgtctgccgccggaagcacctggatcctacggtcattcagc

SEQ ID NO: 2477 - DNA, 158 bp, synthetic construct
  misc_feature 1..158: note = Synthetic nucleic acid
  source 1..158: mol_type = other DNA
cagacgacggccagtgtcgacatgcccgggcgctttgaactaaaaccaaccctggagaaagtctggaacacttcttgcggcgatggttcctggctcttcgatcgccagccggatggcagttttattcgtgcgcggacaggatcctacggtcattcagc

SEQ ID NO: 2478 - DNA, 158 bp, synthetic construct
  misc_feature 1..158: note = Synthetic nucleic acid
  source 1..158: mol_type = other DNA
cagacgacggccagtgtcgacatggccagaaaacgcaaatcaagaaataacagtaaaattggtcacggagcgattaaacacttcttgcggcgatggttcctggctcttcgatccgcccgtgggcattggggaggcttaggatcctacggtcattcagc

SEQ ID NO: 2479 - DNA, 158 bp, synthetic construct
  misc_feature 1..158: note = Synthetic nucleic acid
  source 1..158: mol_type = other DNA
cagacgacggccagtgtcgacatggctgtcgctgccaacaaacgttcggtaatgacgctaacacttcttgcggcgatggttcctggctcttcgatcttaactgaagcagaacgtgaaatgcgtctgggccggagtatcggatcctacggtcattcagc

SEQ ID NO: 2480 - DNA, 158 bp, synthetic construct
  misc_feature 1..158: note = Synthetic nucleic acid
  source 1..158: mol_type = other DNA
cagacgacggccagtgtcgacgtgaagcgacctgcactcattcttatctgcctgttattacaggaacacttcttgcggcgatggttcctggctcttcgatcggtgaaaaccactctcatcaaggcggcaaaacaaggatcctacggtcattcagccgc

SEQ ID NO: 2481 - DNA, 158 bp, synthetic construct
  misc_feature 1..158: note = Synthetic nucleic acid
  source 1..158: mol_type = other DNA
cagacgacggccagtgtcgacgtgttcgctgaatacggggttctgaattactggacctatctggttggggcaacacttcttgcggcgatggttcctggctcttcgatcgctgcccgactggcgacgctgcaatcccggggatcctacggtcattcagc

SEQ ID NO: 2482 - DNA, 158 bp, synthetic construct
  misc_feature 1..158: note = Synthetic nucleic acid
  source 1..158: mol_type = other DNA
cagacgacggccagtgtcgacatgaaacgacgtgacaccatcgtgcgctacaccgcaacacttcttgcggcgatggttcctggctcttcgatctggtaccgtgaggtccgcaagacaacggaaaagaaagctgaaactggatcctacggtcattcagc

SEQ ID NO: 2483 - DNA, 158 bp, synthetic construct
  misc_feature 1..158: note = Synthetic nucleic acid
  source 1..158: mol_type = other DNA
cagacgacggccagtgtcgacatgaaacgtttaattatggccacgatggtcacagcaattctggaacacttcttgcggcgatggttcctggctcttcgatcaatcatcgtcgatagcgaagcactgtttgtgaacaaaggatcctacggtcattcagc

SEQ ID NO: 2484 - DNA, 158 bp, synthetic construct
  misc_feature 1..158: note = Synthetic nucleic acid
  source 1..158: mol_type = other DNA
cagacgacggccagtgtcgacatgaataaagcaaaacgcctggagatcctcactcgcctaacacttcttgcggcgatggttcctggctcttcgatcattgaagatctttgtgaatacaaagagaaagttgacatcctaggatcctacggtcattcagc

SEQ ID NO: 2485 - DNA, 158 bp, synthetic construct
  misc_feature 1..158: note = Synthetic nucleic acid
  source 1..158: mol_type = other DNA
cagacgacggccagtgtcgacatgcgtctgacagcaaaacaggtgacatggctaacacttcttgcggcgatggttcctggctcttcgatcctttttaaccggttacgcaagcaggttcacaacaaattatctgtatttggatcctacggtcattcagc

SEQ ID NO: 2486 - DNA, 158 bp, synthetic construct
  misc_feature 1..158: note = Synthetic nucleic acid
  source 1..158: mol_type = other DNA
cagacgacggccagtgtcgacatgtatcagcctgattttcctcctgtaccttttcgttcaggactaacacttcttgcggcgatggttcctggctcttcgatccagttgctggaaattgcaggagttggcgatgaagcaggatcctacggtcattcagc

SEQ ID NO: 2487 - DNA, 158 bp, synthetic construct
  misc_feature 1..158: note = Synthetic nucleic acid
  source 1..158: mol_type = other DNA
cagacgacggccagtgtcgacatgtttaaacgtttaatgatggtcgctttgctggtgattgcacaacacttcttgcggcgatggttcctggctcttcgatcttctcaacagaaaatcactctggaagagaaaaaagcaggatcctacggtcattcagc

SEQ ID NO: 2488 - DNA, 158 bp, synthetic construct
  misc_feature 1..158: note = Synthetic nucleic acid
  source 1..158: mol_type = other DNA
cagacgacggccagtgtcgacgtgttttcttattactttcaaggtcttgcacttggggcggctataacacttcttgcggcgatggttcctggctcttcgatcgacggtattgctcatgcacaagccttgttcagtcccggatcctacggtcattcagc

SEQ ID NO: 2489 - DNA, 158 bp, synthetic construct
  misc_feature 1..158: note = Synthetic nucleic acid
  source 1..158: mol_type = other DNA
cagacgacggccagtgtcgacttggcaactcacgagcgtcgtgtggtgttttttgacttagatggaacattaacacttcttgcggcgatggttcctggctcttcgatcccgcgcggtgaactccagcaactggaatggggatcctacggtcattcagc

SEQ ID NO: 2490 - DNA, 158 bp, synthetic construct
  misc_feature 1..158: note = Synthetic nucleic acid
  source 1..158: mol_type = other DNA
cagacgacggccagtgtcgacatgatcctgcacccttctctcgccagcgcaaatcctctaacacttcttgcggcgatggttcctggctcttcgatctctgactatcgcgcgaccttagctcaattcgccaccctgggcggatcctacggtcattcagc

SEQ ID NO: 2491 - DNA, 158 bp, synthetic construct
  misc_feature 1..158: note = Synthetic nucleic acid
  source 1..158: mol_type = other DNA
cagacgacggccagtgtcgacatgattcgcttatctgaacaaagtcccctgggcaccggaagacatcgaacacttcttgcggcgatggttcctggctcttcgatcaaaacgctggccctcacttcgcgcgaagctggatcctacggtcattcagccgc

SEQ ID NO: 2492 - DNA, 158 bp, synthetic construct
  misc_feature 1..158: note = Synthetic nucleic acid
  source 1..158: mol_type = other DNA
cagacgacggccagtgtcgacatggcaactgactcaacacaatgtgtaaaaaaaagccgtggcaacacttcttgcggcgatggttcctggctcttcgatcgaacgactttgcgtttatggcccgaactggtgaaagtaggatcctacggtcattcagc

SEQ ID NO: 2493 - DNA, 158 bp, synthetic construct
  misc_feature 1..158: note = Synthetic nucleic acid
  source 1..158: mol_type = other DNA
cagacgacggccagtgtcgacatggggctttgtagtcgttataaaagtcttacatgcaatagttgctcaatgaacacttcttgcggcgatggttcctggctcttcgatcttattcgttcacattcggtccaacatagtggatcctacggtcattcagc

SEQ ID NO: 2494 - DNA, 158 bp, synthetic construct
  misc_feature 1..158: note = Synthetic nucleic acid
  source 1..158: mol_type = other DNA
cagacgacggccagtgtcgacatggtgcttggcaaaccgcaaacagacccgactctcgaataacacttcttgcggcgatggttcctggctcttcgatccgcacacggtaaaaccatcgtcgtttacggcactcgtatcggatcctacggtcattcagc

SEQ ID NO: 2495 - DNA, 158 bp, synthetic construct
  misc_feature 1..158: note = Synthetic nucleic acid
  source 1..158: mol_type = other DNA
cagacgacggccagtgtcgacatgtcactgagcagaactcaaattgttaactggctcactcgttaacacttcttgcggcgatggttcctggctcttcgatctatgatgcaaatgttggcgttagccgcaaaagaggagggatcctacggtcattcagc

SEQ ID NO: 2496 - DNA, 158 bp, synthetic construct
  misc_feature 1..158: note = Synthetic nucleic acid
  source 1..158: mol_type = other DNA
cagacgacggccagtgtcgacttgactaatttgaattatcaacagacgcattttgtgatgagtgcgcctaacacttcttgcggcgatggttcctggctcttcgatcagcctgtagaagaaacgcaggacggcgaacttggatcctacggtcattcagc

SEQ ID NO: 2497 - DNA, 158 bp, synthetic construct
  misc_feature 1..158: note = Synthetic nucleic acid
  source 1..158: mol_type = other DNA
cagacgacggccagtgtcgacatgaaaagcctctcctataagcggatctataaatcacaagaatacctggcaaaacacttcttgcggcgatggttcctggctcttcgatcacaggagtttcctgcggaacttgagcccggatcctacggtcattcagc

SEQ ID NO: 2498 - DNA, 158 bp, synthetic construct
  misc_feature 1..158: note = Synthetic nucleic acid
  source 1..158: mol_type = other DNA
cagacgacggccagtgtcgacatgacaggtaagaagcgttctgccagctccagccgctaacacttcttgcggcgatggttcctggctcttcgatcttcgcgggaagtgtatattgtagcgaccgggcgtaaacccaccggatcctacggtcattcagc

SEQ ID NO: 2499 - DNA, 158 bp, synthetic construct
  misc_feature 1..158: note = Synthetic nucleic acid
  source 1..158: mol_type = other DNA
cagacgacggccagtgtcgacatgacccgcacactcaagccgttaattcttaacaccagcgcactaacacttcttgcggcgatggttcctggctcttcgatccgccagctacggcgctttggcttgataaccggattgggatcctacggtcattcagc

SEQ ID NO: 2500 - DNA, 158 bp, synthetic construct
  misc_feature 1..158: note = Synthetic nucleic acid
  source 1..158: mol_type = other DNA
cagacgacggccagtgtcgacatgattggtttagtcggtaaaaaagtgggtatgacccgtatcttcacaaacacttcttgcggcgatggttcctggctcttcgatcacctgatcgttaaaccagctgtgaaggcgcacggatcctacggtcattcagc

SEQ ID NO: 2501 - DNA, 158 bp, synthetic construct
  misc_feature 1..158: note = Synthetic nucleic acid
  source 1..158: mol_type = other DNA
cagacgacggccagtgtcgacatgcatcgtatagacacgaaaaccgcgcagaaggataaaacacttcttgcggcgatggttcctggctcttcgatcacgggtagttattactataactggattgctattgggtatatcggatcctacggtcattcagc

SEQ ID NO: 2502 - DNA, 158 bp, synthetic construct
  misc_feature 1..158: note = Synthetic nucleic acid
  source 1..158: mol_type = other DNA
cagacgacggccagtgtcgacatgcttaagccagacaacctgcccgttacatttggcaaaaaaacacttcttgcggcgatggttcctggctcttcgatccagctgcatcatcaagcgttaaaaaatgagtgggcagagggatcctacggtcattcagc

SEQ ID NO: 2503 - DNA, 158 bp, synthetic construct
  misc_feature 1..158: note = Synthetic nucleic acid
  source 1..158: mol_type = other DNA
cagacgacggccagtgtcgacatgggggatactatgcaacaacgattaacgcaggatttaacgcaatttaacacttcttgcggcgatggttcctggctcttcgatcgtcaatattcccgcgcctggacggttaaaaggggatcctacggtcattcagc

SEQ ID NO: 2504 - DNA, 158 bp, synthetic construct
  misc_feature 1..158: note = Synthetic nucleic acid
  source 1..158: mol_type = other DNA
cagacgacggccagtgtcgacatgaaaaagatttggctggcgctggctggtttagttttaaacacttcttgcggcgatggttcctggctcttcgatcagtatgctgatacagtgaaatatctgtccgagaaaaaaccgggatcctacggtcattcagc

SEQ ID NO: 2505 - DNA, 158 bp, synthetic construct
  misc_feature 1..158: note = Synthetic nucleic acid
  source 1..158: mol_type = other DNA
cagacgacggccagtgtcgacatgaagatcgtggaagtcaaacacccactcgtcaaacacaagctaacacttcttgcggcgatggttcctggctcttcgatcggcgatgccggtgacaaaatctttggtacgaaatatggatcctacggtcattcagc

SEQ ID NO: 2506 - DNA, 158 bp, synthetic construct
  misc_feature 1..158: note = Synthetic nucleic acid
  source 1..158: mol_type = other DNA
cagacgacggccagtgtcgacatgacatacgatagtgaattcggatcacatgtatccctatatcgggatagaatcaaaaacacttcttgcggcgatggttcctggctcttcgatcatttcggctgcagtcgcgggtgcggatcctacggtcattcagc

SEQ ID NO: 2507 - DNA, 158 bp, synthetic construct
  misc_feature 1..158: note = Synthetic nucleic acid
  source 1..158: mol_type = other DNA
cagacgacggccagtgtcgacatgaccaaaccgtatgttcgtcttgataaaaatgatgctgccgttttaacacttcttgcggcgatggttcctggctcttcgatcaccagttatgacacgttaacgaagcagaaaggatcctacggtcattcagccgc

SEQ ID NO: 2508 - DNA, 158 bp, synthetic construct
  misc_feature 1..158: note = Synthetic nucleic acid
  source 1..158: mol_type = other DNA
cagacgacggccagtgtcgacatgatgaacttcaacaatgttttccgctggcatttgcccttaacacttcttgcggcgatggttcctggctcttcgatcgcgaagcagttgcagcctttagtaaatcatgactcaaggggatcctacggtcattcagc

SEQ ID NO: 2509 - DNA, 158 bp, synthetic construct
  misc_feature 1..158: note = Synthetic nucleic acid
  source 1..158: mol_type = other DNA
cagacgacggccagtgtcgacatgattacgctgtggggtcggaataattcaactaacgtaaaaaaagtattgctaacacttcttgcggcgatggttcctggctcttcgatcaaagtggtgatgattcccgttagcaaaggatcctacggtcattcagc

SEQ ID NO: 2510 - DNA, 158 bp, synthetic construct
  misc_feature 1..158: note = Synthetic nucleic acid
  source 1..158: mol_type = other DNA
cagacgacggccagtgtcgacatgctttggtcgtttatcgctgtctgtctttccgcatggctataacacttcttgcggcgatggttcctggctcttcgatccggtcacttcctgatcgtccgctcgctgtatctccttggatcctacggtcattcagc

SEQ ID NO: 2511 - DNA, 158 bp, synthetic construct
  misc_feature 1..158: note = Synthetic nucleic acid
  source 1..158: mol_type = other DNA
cagacgacggccagtgtcgacatggtaagcagacgcgtacaagcacttctggatcaattacgtgcaacacttcttgcggcgatggttcctggctcttcgatccgctttgtccctttagtgaagggtgagctggctctgggatcctacggtcattcagc

SEQ ID NO: 2512 - DNA, 158 bp, synthetic construct
  misc_feature 1..158: note = Synthetic nucleic acid
  source 1..158: mol_type = other DNA
cagacgacggccagtgtcgacatgagccatcatcacgaagggtgttgtaaacatgaaggccagcaacacttcttgcggcgatggttcctggctcttcgatccgaccgcgccgcttttgatattacgcaactggatttaggatcctacggtcattcagc

SEQ ID NO: 2513 - DNA, 158 bp, synthetic construct
  misc_feature 1..158: note = Synthetic nucleic acid
  source 1..158: mol_type = other DNA
cagacgacggccagtgtcgacatgaggcacgggctgctggcgctgatttgctgaacacttcttgcggcgatggttcctggctcttcgatcaatcccaatttcattggcatttatcgtttaaattttctggcgcgaggatcctacggtcattcagccgc

SEQ ID NO: 2514 - DNA, 158 bp, synthetic construct
  misc_feature 1..158: note = Synthetic nucleic acid
  source 1..158: mol_type = other DNA
cagacgacggccagtgtcgacatgcccctgcccgattttcgtcttatccgcctaacacttcttgcggcgatggttcctggctcttcgatcggtggtcaacgcatcaagttaaaaatggataactggatagtgaaaggtggatcctacggtcattcagc

SEQ ID NO: 2515 - DNA, 158 bp, synthetic construct
  misc_feature 1..158: note = Synthetic nucleic acid
  source 1..158: mol_type = other DNA
cagacgacggccagtgtcgacatgctcgtctattggctggatatagtcggcacagcggtatttgcaacacttcttgcggcgatggttcctggctcttcgatcctaccgacgtttgcgctggatgagaatgggcgtctgggatcctacggtcattcagc

SEQ ID NO: 2516 - DNA, 158 bp, synthetic construct
  misc_feature 1..158: note = Synthetic nucleic acid
  source 1..158: mol_type = other DNA
cagacgacggccagtgtcgacatggctcaaggcacgctttatattgtttctgcccccagtaacacttcttgcggcgatggttcctggctcttcgatcagcgtcatgacgctttaatcagcaaattgttggcagaccttggatcctacggtcattcagc

SEQ ID NO: 2517 - DNA, 158 bp, synthetic construct
  misc_feature 1..158: note = Synthetic nucleic acid
  source 1..158: mol_type = other DNA
cagacgacggccagtgtcgacatgtcaggtctgccacagggcagaccaacgtttaacacttcttgcggcgatggttcctggctcttcgatcttttcaccagtgatatcatcatggtagatgcacataaagcggcaattggatcctacggtcattcagc

SEQ ID NO: 2518 - DNA, 158 bp, synthetic construct
  misc_feature 1..158: note = Synthetic nucleic acid
  source 1..158: mol_type = other DNA
cagacgacggccagtgtcgacatgtcatacagcggcgaacgagataactttgcacccaacacttcttgcggcgatggttcctggctcttcgatctggaatacggtctggtcgattcgattctgacccatcgtaatagaggatcctacggtcattcagc

SEQ ID NO: 2519 - DNA, 158 bp, synthetic construct
  misc_feature 1..158: note = Synthetic nucleic acid
  source 1..158: mol_type = other DNA
cagacgacggccagtgtcgacgtgctcaacaaactctccttactgctgaaagacgcagaacacttcttgcggcgatggttcctggctcttcgatctggcgaacgtcatctggtggtgattaaagcaaataaaattgctggatcctacggtcattcagc

SEQ ID NO: 2520 - DNA, 158 bp, synthetic construct
  misc_feature 1..158: note = Synthetic nucleic acid
  source 1..158: mol_type = other DNA
cagacgacggccagtgtcgacgtgggtatgcttgaagccagagagttactttgtgagcgggatgaacgaaaacacttcttgcggcgatggttcctggctcttcgatccatttcactgacgcaaacgagggccgcatccggatcctacggtcattcagc

SEQ ID NO: 2521 - DNA, 158 bp, synthetic construct
  misc_feature 1..158: note = Synthetic nucleic acid
  source 1..158: mol_type = other DNA
cagacgacggccagtgtcgacatgaaaactacgcatacctccctcccctttgccgaacacttcttgcggcgatggttcctggctcttcgatcgcagataaaagaaaagatagtcataacgctgtgccaacacgatcggggatcctacggtcattcagc

SEQ ID NO: 2522 - DNA, 158 bp, synthetic construct
  misc_feature 1..158: note = Synthetic nucleic acid
  source 1..158: mol_type = other DNA
cagacgacggccagtgtcgacatgaccaccccaacttttgacaccatcgaagcgcaagcaaaacacttcttgcggcgatggttcctggctcttcgatccaccctggtgtttgaagtcgaactgctggaaatcctcaggggatcctacggtcattcagc

SEQ ID NO: 2523 - DNA, 158 bp, synthetic construct
  misc_feature 1..158: note = Synthetic nucleic acid
  source 1..158: mol_type = other DNA
cagacgacggccagtgtcgacatgaccttagaatggtggtttgcctacctgctgacatcgatcattttaagcaacacttcttgcggcgatggttcctggctcttcgatccgctgttagcatcggcgaggcatgcgcgaggatcctacggtcattcagc

SEQ ID NO: 2524 - DNA, 158 bp, synthetic construct
  misc_feature 1..158: note = Synthetic nucleic acid
  source 1..158: mol_type = other DNA
cagacgacggccagtgtcgacatgagccagtttttttatattcatcctgataacccacagcaacgtctaacacttcttgcggcgatggttcctggctcttcgatcgaaggcgtaggtgatgtgaagcctttcttatgcggatcctacggtcattcagc

SEQ ID NO: 2525 - DNA, 158 bp, synthetic construct
  misc_feature 1..158: note = Synthetic nucleic acid
  source 1..158: mol_type = other DNA
cagacgacggccagtgtcgacatgagctataccctgccatccctgccgtatgcttacgatgccctaacacttcttgcggcgatggttcctggctcttcgatcgacgaagcagcggcacgttttgcggcgaaaaaatatggatcctacggtcattcagc

SEQ ID NO: 2526 - DNA, 158 bp, synthetic construct
  misc_feature 1..158: note = Synthetic nucleic acid
  source 1..158: mol_type = other DNA
cagacgacggccagtgtcgacatgaggtatatagttgccttaacgggaggcattggcagtggcaaaacacttcttgcggcgatggttcctggctcttcgatccttgcgtcgcagtttgtctcacaggaaaaaccgaccggatcctacggtcattcagc

SEQ ID NO: 2527 - DNA, 158 bp, synthetic construct
  misc_feature 1..158: note = Synthetic nucleic acid
  source 1..158: mol_type = other DNA
cagacgacggccagtgtcgacatgccaaaattacgcctgatcggattaactttactcgcacttagcaacacttcttgcggcgatggttcctggctcttcgatccaagccgcaaacgcaaagatcgctggatgaacgtgggatcctacggtcattcagc

SEQ ID NO: 2528 - DNA, 158 bp, synthetic construct
  misc_feature 1..158: note = Synthetic nucleic acid
  source 1..158: mol_type = other DNA
cagacgacggccagtgtcgacatgctgaaaactatccgaaaacacggcattacgttggcgctatttaacacttcttgcggcgatggttcctggctcttcgatccacaactttctcaacttcctgcctgtggagaaaccggatcctacggtcattcagc

SEQ ID NO: 2529 - DNA, 158 bp, synthetic construct
  misc_feature 1..158: note = Synthetic nucleic acid
  source 1..158: mol_type = other DNA
cagacgacggccagtgtcgacatggcaagatatttgggtcctaagctcaagctgagccaacacttcttgcggcgatggttcctggctcttcgatcggacattaacgaacacctgatcgtcgagctttactccaagtacggatcctacggtcattcagc

SEQ ID NO: 2530 - DNA, 158 bp, synthetic construct
  misc_feature 1..158: note = Synthetic nucleic acid
  source 1..158: mol_type = other DNA
cagacgacggccagtgtcgacatgttgatgttatttctcaccgtcgccatggtgcacattaacacttcttgcggcgatggttcctggctcttcgatctatttgccggatttggcattcatttgattatttcgcggtggggatcctacggtcattcagc

SEQ ID NO: 2531 - DNA, 158 bp, synthetic construct
  misc_feature 1..158: note = Synthetic nucleic acid
  source 1..158: mol_type = other DNA
cagacgacggccagtgtcgacgtgctagaccgccatcttcatccccggattaaaccgttgttgaacacttcttgcggcgatggttcctggctcttcgatcgtgggtatctgacgctgaagtcgctccagcgtcagccaggatcctacggtcattcagc

SEQ ID NO: 2532 - DNA, 158 bp, synthetic construct
  misc_feature 1..158: note = Synthetic nucleic acid
  source 1..158: mol_type = other DNA
cagacgacggccagtgtcgacatgaaagcttcactggcgctgctcagcctgctaaaacacttcttgcggcgatggttcctggctcttcgatcgtttaactggcggatggtggggcattatcgttattttgttaaaggtggatcctacggtcattcagc

SEQ ID NO: 2533 - DNA, 158 bp, synthetic construct
  misc_feature 1..158: note = Synthetic nucleic acid
  source 1..158: mol_type = other DNA
cagacgacggccagtgtcgacatgacaacccagtatggattttttattgattccagccgttgcaccgaacacttcttgcggcgatggttcctggctcttcgatccactggctatctggcaaacccgaaggaggtgccaggatcctacggtcattcagc

SEQ ID NO: 2534 - DNA, 158 bp, synthetic construct
  misc_feature 1..158: note = Synthetic nucleic acid
  source 1..158: mol_type = other DNA
cagacgacggccagtgtcgacatgaccacacaatatggattttttatcgattccagccgctgtactaacacttcttgcggcgatggttcctggctcttcgatcccactggttatctggctaatccggaggaagtgtatggatcctacggtcattcagc

SEQ ID NO: 2535 - DNA, 158 bp, synthetic construct
  misc_feature 1..158: note = Synthetic nucleic acid
  source 1..158: mol_type = other DNA
cagacgacggccagtgtcgacatgattaaggtgtatggcgtacccggatggggctaacacttcttgcggcgatggttcctggctcttcgatcgttaccgaaattacaagaagtattaaaaaggaatgaaattattcgtggatcctacggtcattcagc

SEQ ID NO: 2536 - DNA, 158 bp, synthetic construct
  misc_feature 1..158: note = Synthetic nucleic acid
  source 1..158: mol_type = other DNA
cagacgacggccagtgtcgacatgcagtggcaaactaaactcccgctgatcgccattttgaacacttcttgcggcgatggttcctggctcttcgatccagcagcatttgttaaggcgtatcgagaggcagtgcaagctggatcctacggtcattcagc

SEQ ID NO: 2537 - DNA, 158 bp, synthetic construct
  misc_feature 1..158: note = Synthetic nucleic acid
  source 1..158: mol_type = other DNA
cagacgacggccagtgtcgacatgctgttacacattttgtatttggttggcattactgccgaagcaacacttcttgcggcgatggttcctggctcttcgatcttaccggtcttttactacagccacgaaggacacgaaggatcctacggtcattcagc

SEQ ID NO: 2538 - DNA, 158 bp, synthetic construct
  misc_feature 1..158: note = Synthetic nucleic acid
  source 1..158: mol_type = other DNA
cagacgacggccagtgtcgacatggcacagctatatttctactattccgcaatgaatgcgggtaaaacacttcttgcggcgatggttcctggctcttcgatcttaacggctattcaggaaaggcatcgccacgattcgggatcctacggtcattcagc

SEQ ID NO: 2539 - DNA, 158 bp, synthetic construct
  misc_feature 1..158: note = Synthetic nucleic acid
  source 1..158: mol_type = other DNA
cagacgacggccagtgtcgacatgaacgcaataattattgatgaccatcctcttgctatcgcagcaattaacacttcttgcggcgatggttcctggctcttcgatcacacattcgcacaacgtaacaaaatcggccatggatcctacggtcattcagc

SEQ ID NO: 2540 - DNA, 158 bp, synthetic construct
  misc_feature 1..158: note = Synthetic nucleic acid
  source 1..158: mol_type = other DNA
cagacgacggccagtgtcgacatgaatatatttgaacaaactccaccgaaccgcagacgttatggtaacacttcttgcggcgatggttcctggctcttcgatccagaccctgagatccctttaggctcaaacagacagggatcctacggtcattcagc

SEQ ID NO: 2541 - DNA, 158 bp, synthetic construct
  misc_feature 1..158: note = Synthetic nucleic acid
  source 1..158: mol_type = other DNA
cagacgacggccagtgtcgacatgacccatttttcacagcaagataatttttctgtcgcggcaacacttcttgcggcgatggttcctggctcttcgatcctgttaattcctgtcgcggttaaaccgctgtttcgattgggatcctacggtcattcagc

SEQ ID NO: 2542 - DNA, 158 bp, synthetic construct
  misc_feature 1..158: note = Synthetic nucleic acid
  source 1..158: mol_type = other DNA
cagacgacggccagtgtcgacatggaaagctggttaattcctgcggcaccggtcaaacacttcttgcggcgatggttcctggctcttcgatcggattttagccgtggttcattgcaattgttagcgattgaagaaaggggatcctacggtcattcagc

SEQ ID NO: 2543 - DNA, 158 bp, synthetic construct
  misc_feature 1..158: note = Synthetic nucleic acid
  source 1..158: mol_type = other DNA
cagacgacggccagtgtcgacatggcaactgatactttgacgcacgcgactgccaacacttcttgcggcgatggttcctggctcttcgatctttggatctgtgtgttcactgttgtttatctgatgggggcgatggttggatcctacggtcattcagc

SEQ ID NO: 2544 - DNA, 158 bp, synthetic construct
  misc_feature 1..158: note = Synthetic nucleic acid
  source 1..158: mol_type = other DNA
cagacgacggccagtgtcgacatgaaaaaaattgccatcacctgtgcattactctcaagcttagtagcaaaacacttcttgcggcgatggttcctggctcttcgatcaggcgtcacggtagatgatcaacgtaaggcgggatcctacggtcattcagc

SEQ ID NO: 2545 - DNA, 158 bp, synthetic construct
  misc_feature 1..158: note = Synthetic nucleic acid
  source 1..158: mol_type = other DNA
cagacgacggccagtgtcgacatgcgactgtggttaattcgtcatggtgaaacgcaagcgaatatcaacacttcttgcggcgatggttcctggctcttcgatctcaatagccgtgccatcggggtcgagaatgcacatggatcctacggtcattcagc

SEQ ID NO: 2546 - DNA, 158 bp, synthetic construct
  misc_feature 1..158: note = Synthetic nucleic acid
  source 1..158: mol_type = other DNA
cagacgacggccagtgtcgacatgttaacagaacaacaacgtcgcgaactggactgggaaaaaaaacacttcttgcggcgatggttcctggctcttcgatcgacggtaattgagaacctgcgtaaacggcatcagcaaggatcctacggtcattcagc

SEQ ID NO: 2547 - DNA, 158 bp, synthetic construct
  misc_feature 1..158: note = Synthetic nucleic acid
  source 1..158: mol_type = other DNA
cagacgacggccagtgtcgacgtgaaattgagatggtttgcctttttgattgtgttattagcgggttgttaacacttcttgcggcgatggttcctggctcttcgatccaaacttgagcaggcactggacgcgatgctaggatcctacggtcattcagc

SEQ ID NO: 2548 - DNA, 158 bp, synthetic construct
  misc_feature 1..158: note = Synthetic nucleic acid
  source 1..158: mol_type = other DNA
cagacgacggccagtgtcgacgtgaatcgttttgtaattgctgactccacgctctgtatcggaacacttcttgcggcgatggttcctggctcttcgatcaccttgtttcagcaggctcaaagtggagaggctaaatggggatcctacggtcattcagc

SEQ ID NO: 2549 - DNA, 158 bp, synthetic construct
  misc_feature 1..158: note = Synthetic nucleic acid
  source 1..158: mol_type = other DNA
cagacgacggccagtgtcgacgtgataggcagactcagaggcatcatcattgaaaaacaacccccgaacacttcttgcggcgatggttcctggctcttcgatcctttaattcgcgaagccctacgcgccgcgttacttggatcctacggtcattcagc

SEQ ID NO: 2550 - DNA, 158 bp, synthetic construct
  misc_feature 1..158: note = Synthetic nucleic acid
  source 1..158: mol_type = other DNA
cagacgacggccagtgtcgacatgaaaaacaggctgctgatcctcagcctgctggtttctgtacctaacacttcttgcggcgatggttcctggctcttcgatccggtcgccaaagaatggccgctgttttcgtggggatcctacggtcattcagccgc

SEQ ID NO: 2551 - DNA, 158 bp, synthetic construct
  misc_feature 1..158: note = Synthetic nucleic acid
  source 1..158: mol_type = other DNA
cagacgacggccagtgtcgacatgaaactcgtcggtagctacaccagcccgtttgtacgcaaactttaacacttcttgcggcgatggttcctggctcttcgatcaagttttgctcgcaccgaaccgccaaaggcttggggatcctacggtcattcagc

SEQ ID NO: 2552 - DNA, 158 bp, synthetic construct
  misc_feature 1..158: note = Synthetic nucleic acid
  source 1..158: mol_type = other DNA
cagacgacggccagtgtcgacatgaaagcgttaacggccaggcaacaagaggtgtttgatctcatccaacacttcttgcggcgatggttcctggctcttcgatcggttggggttattcgcaacggcgactggctggaaggatcctacggtcattcagc

SEQ ID NO: 2553 - DNA, 158 bp, synthetic construct
  misc_feature 1..158: note = Synthetic nucleic acid
  source 1..158: mol_type = other DNA
cagacgacggccagtgtcgacatgaaaaagatcctgacaaccccgatcaaagctgaagatctgcaaaacacttcttgcggcgatggttcctggctcttcgatcaagagatctgcgagcacgtccattacatcaaagaaggatcctacggtcattcagc

SEQ ID NO: 2554 - DNA, 158 bp, synthetic construct
  misc_feature 1..158: note = Synthetic nucleic acid
  source 1..158: mol_type = other DNA
cagacgacggccagtgtcgacatgaaattgttctacaaaccgggtgcctgctctctcgcttcaacacttcttgcggcgatggttcctggctcttcgatcgaagtacaagacgcgctgtcagcggaaggcttaaagtcgggatcctacggtcattcagc

SEQ ID NO: 2555 - DNA, 158 bp, synthetic construct
  misc_feature 1..158: note = Synthetic nucleic acid
  source 1..158: mol_type = other DNA
cagacgacggccagtgtcgacatgacgctctaccagataaaaccgctctttcagtcgctaacacttcttgcggcgatggttcctggctcttcgatcaatcgttgtcggagtgtgcttcttatgagcgctgaaatagcgggatcctacggtcattcagc

SEQ ID NO: 2556 - DNA, 158 bp, synthetic construct
  misc_feature 1..158: note = Synthetic nucleic acid
  source 1..158: mol_type = other DNA
cagacgacggccagtgtcgacatgagcaaggtattagttcttaaatccagcatcctggcagggtaaacacttcttgcggcgatggttcctggctcttcgatcgcaaaagcagccatcgacagcattgtttctgcaaaaggatcctacggtcattcagc

SEQ ID NO: 2557 - DNA, 158 bp, synthetic construct
  misc_feature 1..158: note = Synthetic nucleic acid
  source 1..158: mol_type = other DNA
cagacgacggccagtgtcgacatgagtataaaaaatctacctgccgactatttattggctgcacaacagggtaacacttcttgcggcgatggttcctggctcttcgatccgcagttactgattgccgcaggtgcatcaggatcctacggtcattcagc

SEQ ID NO: 2558 - DNA, 158 bp, synthetic construct
  misc_feature 1..158: note = Synthetic nucleic acid
  source 1..158: mol_type = other DNA
cagacgacggccagtgtcgacatgcaaaccagcccgctgttaacacagcttatggaagcaaacacttcttgcggcgatggttcctggctcttcgatctgtcacactcccttgccgggcgtcataagattcgttttgttggatcctacggtcattcagc

SEQ ID NO: 2559 - DNA, 158 bp, synthetic construct
  misc_feature 1..158: note = Synthetic nucleic acid
  source 1..158: mol_type = other DNA
cagacgacggccagtgtcgacatgccttttaaacctttagtgacggcaggaattgaaagtctgctaacacttcttgcggcgatggttcctggctcttcgatcctgaccaaacggctggaaaaactggaggctaaaggaggatcctacggtcattcagc

SEQ ID NO: 2560 - DNA, 158 bp, synthetic construct
  misc_feature 1..158: note = Synthetic nucleic acid
  source 1..158: mol_type = other DNA
cagacgacggccagtgtcgacatggaattagtattgaaagacgcgcagagcgcgctgactaacacttcttgcggcgatggttcctggctcttcgatcctgctgatgctgttaagcaagttgaggagatgctggcagggggatcctacggtcattcagc

SEQ ID NO: 2561 - DNA, 158 bp, synthetic construct
  misc_feature 1..158: note = Synthetic nucleic acid
  source 1..158: mol_type = other DNA
cagacgacggccagtgtcgacatggcagagaaatttatcaaacacacaggcctggtggttaacacttcttgcggcgatggttcctggctcttcgatcttgccgcttatgaagcaaaacaacctgcgtttatgaatatcggatcctacggtcattcagc

SEQ ID NO: 2562 - DNA, 158 bp, synthetic construct
  misc_feature 1..158: note = Synthetic nucleic acid
  source 1..158: mol_type = other DNA
cagacgacggccagtgtcgacatggcgctgcatgacgaaaacgtcgtctggcataaacacttcttgcggcgatggttcctggctcttcgatcgcaattattagatctgttgagacagaacgatattatcagatcctgcggatcctacggtcattcagc

SEQ ID NO: 2563 - DNA, 158 bp, synthetic construct
  misc_feature 1..158: note = Synthetic nucleic acid
  source 1..158: mol_type = other DNA
cagacgacggccagtgtcgacatgagcgataaattcggcgaagggcgcgatccaacacttcttgcggcgatggttcctggctcttcgatccagatgatatttagcaaagtggtaagcgaagccggggaatctgagtccggatcctacggtcattcagc

SEQ ID NO: 2564 - DNA, 158 bp, synthetic construct
  misc_feature 1..158: note = Synthetic nucleic acid
  source 1..158: mol_type = other DNA
cagacgacggccagtgtcgacatgcataaagcaatattaaatagtgaccttattgcaacaaaggcaggggatgttaaacacttcttgcggcgatggttcctggctcttcgatcctggcctgaactgccggaggcggttggatcctacggtcattcagc

SEQ ID NO: 2565 - DNA, 158 bp, synthetic construct
  misc_feature 1..158: note = Synthetic nucleic acid
  source 1..158: mol_type = other DNA
cagacgacggccagtgtcgacatgggaaattctgaccgtaagcctggtctgattaagcgcctgtaacacttcttgcggcgatggttcctggctcttcgatcgctgcccgatatgcgtgaagtcgagccaggttttggcggatcctacggtcattcagc

SEQ ID NO: 2566 - DNA, 158 bp, synthetic construct
  misc_feature 1..158: note = Synthetic nucleic acid
  source 1..158: mol_type = other DNA
cagacgacggccagtgtcgacatgaaacagagccatttttttgcccatctctcccgcctaacacttcttgcggcgatggttcctggctcttcgatccatctttcgctcgatgagattagccaggattcaccgctgtctggatcctacggtcattcagc

SEQ ID NO: 2567 - DNA, 158 bp, synthetic construct
  misc_feature 1..158: note = Synthetic nucleic acid
  source 1..158: mol_type = other DNA
cagacgacggccagtgtcgacatgaacaaacacaccgaacatgatactcgcgaacatctcctgaacacttcttgcggcgatggttcctggctcttcgatccccatgtaaaaaacattattgcgacgcctgccgtttcaggatcctacggtcattcagc

SEQ ID NO: 2568 - DNA, 158 bp, synthetic construct
  misc_feature 1..158: note = Synthetic nucleic acid
  source 1..158: mol_type = other DNA
cagacgacggccagtgtcgacatgaagccagggtgtacgctgttttttctcttatgttctgcattaaaacacttcttgcggcgatggttcctggctcttcgatcgctatctgaatcgcttgaaggtttgaataaattgggatcctacggtcattcagc

SEQ ID NO: 2569 - DNA, 158 bp, synthetic construct
  misc_feature 1..158: note = Synthetic nucleic acid
  source 1..158: mol_type = other DNA
cagacgacggccagtgtcgacatgaccacgctgacagcacaacagattgcctgtgtttaaacacttcttgcggcgatggttcctggctcttcgatcttattgctggtgttagtggagtgcgaccaccaaaacagatatggatcctacggtcattcagc

SEQ ID NO: 2570 - DNA, 158 bp, synthetic construct
  misc_feature 1..158: note = Synthetic nucleic acid
  source 1..158: mol_type = other DNA
cagacgacggccagtgtcgacatgtatctcagtaaagtcatcattgccagggcctggagcaggaacacttcttgcggcgatggttcctggctcttcgatccgatgggatgtggcttgctatctttggctccactgtacggatcctacggtcattcagc

SEQ ID NO: 2571 - DNA, 158 bp, synthetic construct
  misc_feature 1..158: note = Synthetic nucleic acid
  source 1..158: mol_type = other DNA
cagacgacggccagtgtcgacatgaaaaaaccgaatcattccggcagcggccaaatccaacacttcttgcggcgatggttcctggctcttcgatcgctgtatcaacgcgaagcacaaggagaaagtgatgctgatcctggatcctacggtcattcagc

SEQ ID NO: 2572 - DNA, 158 bp, synthetic construct
  misc_feature 1..158: note = Synthetic nucleic acid
  source 1..158: mol_type = other DNA
cagacgacggccagtgtcgacatgaaacagcccaaaataccggtgaaaatgctgacaacaaacacttcttgcggcgatggttcctggctcttcgatccgattaatatggcgaaattgttgcagcggagattggattgcggatcctacggtcattcagc

SEQ ID NO: 2573 - DNA, 158 bp, synthetic construct
  misc_feature 1..158: note = Synthetic nucleic acid
  source 1..158: mol_type = other DNA
cagacgacggccagtgtcgacatgatcgaatttgtttatccgcacacgcagctggttgcgggtgtgaacacttcttgcggcgatggttcctggctcttcgatcggcctgtcaaacgcgcactgggacttgcgtccgatggatcctacggtcattcagc

SEQ ID NO: 2574 - DNA, 158 bp, synthetic construct
  misc_feature 1..158: note = Synthetic nucleic acid
  source 1..158: mol_type = other DNA
cagacgacggccagtgtcgacatgctggaaaatttgaatctctctctattctctcttattaacgcgacgccaaacacttcttgcggcgatggttcctggctcttcgatccgatccgcaaaggctgggtgcgtgacaggggatcctacggtcattcagc

SEQ ID NO: 2575 - DNA, 158 bp, synthetic construct
  misc_feature 1..158: note = Synthetic nucleic acid
  source 1..158: mol_type = other DNA
cagacgacggccagtgtcgacatggcagaaaaacaaactgcgaaaaggaaccgtcgcgaggaaatacttaacacttcttgcggcgatggttcctggctcttcgatcgctggccgctaattgcggcacagttgcagccgggatcctacggtcattcagc

SEQ ID NO: 2576 - DNA, 158 bp, synthetic construct
  misc_feature 1..158: note = Synthetic nucleic acid
  source 1..158: mol_type = other DNA
cagacgacggccagtgtcgacatggctaaagttctggtgctttattattccatgtacggacatattgaaacgataacacttcttgcggcgatggttcctggctcttcgatcggtctggcagttaaacttaacggctccggatcctacggtcattcagc

SEQ ID NO: 2577 - DNA, 158 bp, synthetic construct
  misc_feature 1..158: note = Synthetic nucleic acid
  source 1..158: mol_type = other DNA
cagacgacggccagtgtcgacatgacttctctgtatttagcttccggttctccgcgtcgtaacacttcttgcggcgatggttcctggctcttcgatcttaacgcactgcgtgagaaaagggataaacatgacggccacggatcctacggtcattcagc

SEQ ID NO: 2578 - DNA, 158 bp, synthetic construct
  misc_feature 1..158: note = Synthetic nucleic acid
  source 1..158: mol_type = other DNA
cagacgacggccagtgtcgacatgagcctgatccgcactgaaaccagagacacaaaacgcgaacacttcttgcggcgatggttcctggctcttcgatctgatgattacgtcccccaggcaccggagcaaatcaactcgggatcctacggtcattcagc

SEQ ID NO: 2579 - DNA, 158 bp, synthetic construct
  misc_feature 1..158: note = Synthetic nucleic acid
  source 1..158: mol_type = other DNA
cagacgacggccagtgtcgacatgagtagtaaagaacagaaaacgcctgaggggcaagccccaacacttcttgcggcgatggttcctggctcttcgatccgtgcggcgatggttactgtagcgaaagcaaaagctagcggatcctacggtcattcagc

SEQ ID NO: 2580 - DNA, 158 bp, synthetic construct
  misc_feature 1..158: note = Synthetic nucleic acid
  source 1..158: mol_type = other DNA
cagacgacggccagtgtcgacatgcaaaaagttgtcctcgcaaccggcaatgtcggtaaagtaacacttcttgcggcgatggttcctggctcttcgatcgcgttgaaactgctgctggacgctttacgtaatggtcaaggatcctacggtcattcagc

SEQ ID NO: 2581 - DNA, 158 bp, synthetic construct
  misc_feature 1..158: note = Synthetic nucleic acid
  source 1..158: mol_type = other DNA
cagacgacggccagtgtcgacatggaaaaatacctgcacctgttaagtcggggagataaaattggcaacacttcttgcggcgatggttcctggctcttcgatcatgaatccagttcaacgttaaaaactgaatatactggatcctacggtcattcagc

SEQ ID NO: 2582 - DNA, 158 bp, synthetic construct
  misc_feature 1..158: note = Synthetic nucleic acid
  source 1..158: mol_type = other DNA
cagacgacggccagtgtcgacatggtcactaaaaaacaatctcgcgttccaggtcgtcccaaacacttcttgcggcgatggttcctggctcttcgatcaatggcgggggaagcgataaaaactattcttgaggagccgggatcctacggtcattcagc

SEQ ID NO: 2583 - DNA, 158 bp, synthetic construct
  misc_feature 1..158: note = Synthetic nucleic acid
  source 1..158: mol_type = other DNA
cagacgacggccagtgtcgacatgaaagtagcaaaagacctggtggtcagcctggcctatcaggtacgtaaacacttcttgcggcgatggttcctggctcttcgatctaaaggcaacggcggttgcggttgccacgggggatcctacggtcattcagc

SEQ ID NO: 2584 - DNA, 158 bp, synthetic construct
  misc_feature 1..158: note = Synthetic nucleic acid
  source 1..158: mol_type = other DNA
cagacgacggccagtgtcgacatgaacgaagccgttagcccaggtgcgcttagcaccctaacacttcttgcggcgatggttcctggctcttcgatcctgccacgtctgtcctttgaagaagcctgcgggctgttggtgggatcctacggtcattcagc

SEQ ID NO: 2585 - DNA, 158 bp, synthetic construct
  misc_feature 1..158: note = Synthetic nucleic acid
  source 1..158: mol_type = other DNA
cagacgacggccagtgtcgacatgaacgtggtgatccttgataccggctgcgccaacaacacttcttgcggcgatggttcctggctcttcgatcgtgccgctggtgctaagttgctgaaaaacttcctggagatgtatggatcctacggtcattcagc

SEQ ID NO: 2586 - DNA, 158 bp, synthetic construct
  misc_feature 1..158: note = Synthetic nucleic acid
  source 1..158: mol_type = other DNA
cagacgacggccagtgtcgacatgacggcggaaggtcaccttctcttttctattgcttaacacttcttgcggcgatggttcctggctcttcgatcgatccagtttcatcggcttattaagcatcaggttgaatacaatggatcctacggtcattcagc

SEQ ID NO: 2587 - DNA, 158 bp, synthetic construct
  misc_feature 1..158: note = Synthetic nucleic acid
  source 1..158: mol_type = other DNA
cagacgacggccagtgtcgacatgagcgcatcggcactggtttgcctcgcccctaacacttcttgcggcgatggttcctggctcttcgatccatcacaactggtgatggcggcagggatttataattattacgagggaggatcctacggtcattcagc

SEQ ID NO: 2588 - DNA, 158 bp, synthetic construct
  misc_feature 1..158: note = Synthetic nucleic acid
  source 1..158: mol_type = other DNA
cagacgacggccagtgtcgacatgagtgatgaacgctaccaacagcgtcagcagcgaaacacttcttgcggcgatggttcctggctcttcgatccgtttgatgccggtgtaaaagcgcagatagggatcgattatagcggatcctacggtcattcagc

SEQ ID NO: 2589 - DNA, 158 bp, synthetic construct
  misc_feature 1..158: note = Synthetic nucleic acid
  source 1..158: mol_type = other DNA
cagacgacggccagtgtcgacatgatcaccgttgcccttatagacgatcacctcatcgtccgctccggaacacttcttgcggcgatggttcctggctcttcgatcgagctggcgcgccgcatgtttgatggctggcggggatcctacggtcattcagc

SEQ ID NO: 2590 - DNA, 158 bp, synthetic construct
  misc_feature 1..158: note = Synthetic nucleic acid
  source 1..158: mol_type = other DNA
cagacgacggccagtgtcgacatgatggataacatgcagactgaagcacaaccgacacggaccaacacttcttgcggcgatggttcctggctcttcgatctacgcgcgatgattggcggtatcttaaccgcatccgaaggatcctacggtcattcagc

SEQ ID NO: 2591 - DNA, 158 bp, synthetic construct
  misc_feature 1..158: note = Synthetic nucleic acid
  source 1..158: mol_type = other DNA
cagacgacggccagtgtcgacatgcagcttaaacgtgtggcagaagccaaactgccaaaacacttcttgcggcgatggttcctggctcttcgatccgataccaaagccgagaaaatgggccatttgctgaacaaactcggatcctacggtcattcagc

SEQ ID NO: 2592 - DNA, 158 bp, synthetic construct
  misc_feature 1..158: note = Synthetic nucleic acid
  source 1..158: mol_type = other DNA
cagacgacggccagtgtcgacatgcagtctgaacgtatttatttggtatgggcccatcctcgtaacacttcttgcggcgatggttcctggctcttcgatctattatctcaggtacgggatatggtagatgcactaaatggatcctacggtcattcagc

SEQ ID NO: 2593 - DNA, 158 bp, synthetic construct
  misc_feature 1..158: note = Synthetic nucleic acid
  source 1..158: mol_type = other DNA
cagacgacggccagtgtcgacatgccaatttatcagatagacggtctgactccggttgtgcaacacttcttgcggcgatggttcctggctcttcgatcacgcctggtatttgatgagaatctgcgaccgaaacaggggggatcctacggtcattcagc

SEQ ID NO: 2594 - DNA, 158 bp, synthetic construct
  misc_feature 1..158: note = Synthetic nucleic acid
  source 1..158: mol_type = other DNA
cagacgacggccagtgtcgacatgtctcaaatttttgcttactgtcggatatcaacgctggatcagaaacacttcttgcggcgatggttcctggctcttcgatcagccaaagcaaaacttcagacacctgacatacaaggatcctacggtcattcagc

SEQ ID NO: 2595 - DNA, 158 bp, synthetic construct
  misc_feature 1..158: note = Synthetic nucleic acid
  source 1..158: mol_type = other DNA
cagacgacggccagtgtcgacatgtctcgaatttttgcttactgtcggatatcaacgctggatcaaacacttcttgcggcgatggttcctggctcttcgatcagagccaaagcaaaacttcagacacctgacatacccggatcctacggtcattcagc

SEQ ID NO: 2596 - DNA, 158 bp, synthetic construct
  misc_feature 1..158: note = Synthetic nucleic acid
  source 1..158: mol_type = other DNA
cagacgacggccagtgtcgacatgttacaaaacccaattcatctgcgtctggagcgcaacacttcttgcggcgatggttcctggctcttcgatcgtgaggcgggtgagagcaatattggtataatttttcagcaagatggatcctacggtcattcagc

SEQ ID NO: 2597 - DNA, 158 bp, synthetic construct
  misc_feature 1..158: note = Synthetic nucleic acid
  source 1..158: mol_type = other DNA
cagacgacggccagtgtcgacgtgagctattacgcctttgaggggttaattccggtggttcacccgaaacacttcttgcggcgatggttcctggctcttcgatcgcaggggacgacggatgtgacgcctaaacggggatcctacggtcattcagccgc

SEQ ID NO: 2598 - DNA, 158 bp, synthetic construct
  misc_feature 1..158: note = Synthetic nucleic acid
  source 1..158: mol_type = other DNA
cagacgacggccagtgtcgacgtgcaagaaagaattaaagcttgcttcactgaaagcattcaaactcaaattgaacacttcttgcggcgatggttcctggctcttcgatccacgcttttccctcaccaggatgatagaggatcctacggtcattcagc

SEQ ID NO: 2599 - DNA, 158 bp, synthetic construct
  misc_feature 1..158: note = Synthetic nucleic acid
  source 1..158: mol_type = other DNA
cagacgacggccagtgtcgacatgaaaaaaaaggttctggcaatagctctggtaacggtgtttaccggcataacacttcttgcggcgatggttcctggctcttcgatcgtacagttcgacgcgacctggaccagttctggatcctacggtcattcagc

SEQ ID NO: 2600 - DNA, 158 bp, synthetic construct
  misc_feature 1..158: note = Synthetic nucleic acid
  source 1..158: mol_type = other DNA
cagacgacggccagtgtcgacatgaatactttacgtattggcttagtttccatctctgatcgcgcatccaaacacttcttgcggcgatggttcctggctcttcgatcgaagagtgcaagacgcgacgttagcgaaaacggatcctacggtcattcagc

SEQ ID NO: 2601 - DNA, 158 bp, synthetic construct
  misc_feature 1..158: note = Synthetic nucleic acid
  source 1..158: mol_type = other DNA
cagacgacggccagtgtcgacatgactcaaaatatcaggccgttaccccaattcaaatatcatcccaaaacacttcttgcggcgatggttcctggctcttcgatcggcaagctgagactgtggggtgatttttcgttaggatcctacggtcattcagc

SEQ ID NO: 2602 - DNA, 158 bp, synthetic construct
  misc_feature 1..158: note = Synthetic nucleic acid
  source 1..158: mol_type = other DNA
cagacgacggccagtgtcgacatgagccatgtctggggactgttttcccatcccgataacacttcttgcggcgatggttcctggctcttcgatcccctaaccgttatactatggggctacggttatcgtttgttcaggggatcctacggtcattcagc

SEQ ID NO: 2603 - DNA, 158 bp, synthetic construct
  misc_feature 1..158: note = Synthetic nucleic acid
  source 1..158: mol_type = other DNA
cagacgacggccagtgtcgacatgagcgagcaacgcgtggtggtcatggggctgggcaaaacacttcttgcggcgatggttcctggctcttcgatccgcttgcgccagtaccggatgacacaggaggagcagggactcggatcctacggtcattcagc

SEQ ID NO: 2604 - DNA, 158 bp, synthetic construct
  misc_feature 1..158: note = Synthetic nucleic acid
  source 1..158: mol_type = other DNA
cagacgacggccagtgtcgacatgattaatcgccagcagggtttcacattgctggaggtcataacacttcttgcggcgatggttcctggctcttcgatcccagctcagacgcaggccgggaataataaccatgaaaatggatcctacggtcattcagc

SEQ ID NO: 2605 - DNA, 158 bp, synthetic construct
  misc_feature 1..158: note = Synthetic nucleic acid
  source 1..158: mol_type = other DNA
cagacgacggccagtgtcgacatgcccaaattggggatgcagtcgatccggcgcaaacacttcttgcggcgatggttcctggctcttcgatcttccctgacccgccactttatcactcagcatctacccaccgatagaggatcctacggtcattcagc

SEQ ID NO: 2606 - DNA, 158 bp, synthetic construct
  misc_feature 1..158: note = Synthetic nucleic acid
  source 1..158: mol_type = other DNA
cagacgacggccagtgtcgacatggtggaccaggcgcaggacaccctgcgcccaacacttcttgcggcgatggttcctggctcttcgatcactgagctgatttccaaaatcagcttaaaaaaagcctttcaaaagggaggatcctacggtcattcagc

SEQ ID NO: 2607 - DNA, 158 bp, synthetic construct
  misc_feature 1..158: note = Synthetic nucleic acid
  source 1..158: mol_type = other DNA
cagacgacggccagtgtcgacatgtatcggatagttctggggaaagtttcgaccttaagcgcaaacacttcttgcggcgatggttcctggctcttcgatcccgccgacagtgtgcaatggatcgattcagttaacaggggatcctacggtcattcagc

SEQ ID NO: 2608 - DNA, 158 bp, synthetic construct
  misc_feature 1..158: note = Synthetic nucleic acid
  source 1..158: mol_type = other DNA
cagacgacggccagtgtcgacgtgacaccgacccttttaagtgctttttggacttacaccctaacacttcttgcggcgatggttcctggctcttcgatcctgttgctggtctattgcgcggtacgcattttctatggtggatcctacggtcattcagc

SEQ ID NO: 2609 - DNA, 158 bp, synthetic construct
  misc_feature 1..158: note = Synthetic nucleic acid
  source 1..158: mol_type = other DNA
cagacgacggccagtgtcgacatgaataaagttacaaaaacagctattgcgggcttacttgcgcttttaacacttcttgcggcgatggttcctggctcttcgatcgctatcgttaacgtaacgctggattaccgtgttggatcctacggtcattcagc

SEQ ID NO: 2610 - DNA, 158 bp, synthetic construct
  misc_feature 1..158: note = Synthetic nucleic acid
  source 1..158: mol_type = other DNA
cagacgacggccagtgtcgacatgaccctggaaaccgcttttatgcttcccgtgcaggatgcaacacttcttgcggcgatggttcctggctcttcgatcctggctattccgcgaaccactcatgtggaggtgtgcgttggatcctacggtcattcagc

SEQ ID NO: 2611 - DNA, 158 bp, synthetic construct
  misc_feature 1..158: note = Synthetic nucleic acid
  source 1..158: mol_type = other DNA
cagacgacggccagtgtcgacatgcctaaacttattttagcctccacctcgccatggcgtcgaacacttcttgcggcgatggttcctggctcttcgatcatgttacgtcgggaagggaaaaacccgctgatgggaaacggatcctacggtcattcagc

SEQ ID NO: 2612 - DNA, 158 bp, synthetic construct
  misc_feature 1..158: note = Synthetic nucleic acid
  source 1..158: mol_type = other DNA
cagacgacggccagtgtcgacatggacgtgacaaacgatgattacatccgcctgttatcgaacacttcttgcggcgatggttcctggctcttcgatcgcccgtcgcatacctacgtaatttttaaatatccggagtttggatcctacggtcattcagc

SEQ ID NO: 2613 - DNA, 158 bp, synthetic construct
  misc_feature 1..158: note = Synthetic nucleic acid
  source 1..158: mol_type = other DNA
cagacgacggccagtgtcgacatgtctaaaaaattaggttttgccctgtctggtcttatgctggcaacacttcttgcggcgatggttcctggctcttcgatcaaaactaacactgcatacaccattacttatcaggatggatcctacggtcattcagc

SEQ ID NO: 2614 - DNA, 158 bp, synthetic construct
  misc_feature 1..158: note = Synthetic nucleic acid
  source 1..158: mol_type = other DNA
cagacgacggccagtgtcgacatgtttggctatcgcagtaacgtgccaaaagtgcgcttaaccacaaacacttcttgcggcgatggttcctggctcttcgatccattaactaccccagactggacgcccggccgcgcgggatcctacggtcattcagc

SEQ ID NO: 2615 - DNA, 158 bp, synthetic construct
  misc_feature 1..158: note = Synthetic nucleic acid
  source 1..158: mol_type = other DNA
cagacgacggccagtgtcgacgtgaatctgatgacgacgataacaggcgttgtgctggcaggcgaacacttcttgcggcgatggttcctggctcttcgatcgccagaggagcttgcccgatggcaggaaaaacgagctggatcctacggtcattcagc

SEQ ID NO: 2616 - DNA, 158 bp, synthetic construct
  misc_feature 1..158: note = Synthetic nucleic acid
  source 1..158: mol_type = other DNA
cagacgacggccagtgtcgacgtgacgattaaattgattgtcggcctggcgaaccccggtaacacttcttgcggcgatggttcctggctcttcgatcccaaagcaacgaaccgattgcacgcctttaaagcgcaacgaggatcctacggtcattcagc

SEQ ID NO: 2617 - DNA, 158 bp, synthetic construct
  misc_feature 1..158: note = Synthetic nucleic acid
  source 1..158: mol_type = other DNA
cagacgacggccagtgtcgacatgaattttttagctcacctgcatttagcccatctcgcggaaagctcgctttaacacttcttgcggcgatggttcctggctcttcgatcggcgcaggcgtcacgcaaggcgttagagggatcctacggtcattcagc

SEQ ID NO: 2618 - DNA, 158 bp, synthetic construct
  misc_feature 1..158: note = Synthetic nucleic acid
  source 1..158: mol_type = other DNA
cagacgacggccagtgtcgacatgactgactacctgttactgtttgtcggaactgtactggtcaataaaacacttcttgcggcgatggttcctggctcttcgatctttatgggctttagtggtttggtgaagttgagaggatcctacggtcattcagc

SEQ ID NO: 2619 - DNA, 158 bp, synthetic construct
  misc_feature 1..158: note = Synthetic nucleic acid
  source 1..158: mol_type = other DNA
cagacgacggccagtgtcgacatgagcaacatcctgattatcaacggcgcgaaaaaattcgaacacttcttgcggcgatggttcctggctcttcgatctgaagaatatcgcaagcatcttgtggaaatttttggttccggatcctacggtcattcagc

SEQ ID NO: 2620 - DNA, 158 bp, synthetic construct
  misc_feature 1..158: note = Synthetic nucleic acid
  source 1..158: mol_type = other DNA
cagacgacggccagtgtcgacatgcgtctgtgtgaccgagatattgaagcctggcttgatgaaggaacacttcttgcggcgatggttcctggctcttcgatccagggcgcggtagccagccgaatcgataaagactcaggatcctacggtcattcagc

SEQ ID NO: 2621 - DNA, 158 bp, synthetic construct
  misc_feature 1..158: note = Synthetic nucleic acid
  source 1..158: mol_type = other DNA
cagacgacggccagtgtcgacatggcggttcaaaagaatgttatcaaaggcatactggcaggtacaacacttcttgcggcgatggttcctggctcttcgatcggccccgcgagagtacaaacagttgtaactgaatcaggatcctacggtcattcagc

SEQ ID NO: 2622 - DNA, 158 bp, synthetic construct
  misc_feature 1..158: note = Synthetic nucleic acid
  source 1..158: mol_type = other DNA
cagacgacggccagtgtcgacatgtcattcgaattacctgcactaccatatgctaaagatgctctggaacacttcttgcggcgatggttcctggctcttcgatcctgggaattcgtagcgaaaaatctcgctgcaaaaggatcctacggtcattcagc

SEQ ID NO: 2623 - DNA, 158 bp, synthetic construct
  misc_feature 1..158: note = Synthetic nucleic acid
  source 1..158: mol_type = other DNA
cagacgacggccagtgtcgacatgtcggataccaccgaactggttgatttagccgtaatcttaacacttcttgcggcgatggttcctggctcttcgatctcttgttttatatcccctggcacacagcacgtcagtactggatcctacggtcattcagc

SEQ ID NO: 2624 - DNA, 158 bp, synthetic construct
  misc_feature 1..158: note = Synthetic nucleic acid
  source 1..158: mol_type = other DNA
cagacgacggccagtgtcgacatgtctacgcttctttatttacacggtttcaacagctcgccgaacacttcttgcggcgatggttcctggctcttcgatcacccgatcgtcgattttcttggtctgcaccatctccttggatcctacggtcattcagc

SEQ ID NO: 2625 - DNA, 158 bp, synthetic construct
  misc_feature 1..158: note = Synthetic nucleic acid
  source 1..158: mol_type = other DNA
cagacgacggccagtgtcgacgtgcgatatctggcaacattgttgttatctctggcggtgttaatcaccgaacacttcttgcggcgatggttcctggctcttcgatctgcacgcgtctccaccacgctgggtaactcgggatcctacggtcattcagc

SEQ ID NO: 2626 - DNA, 158 bp, synthetic construct
  misc_feature 1..158: note = Synthetic nucleic acid
  source 1..158: mol_type = other DNA
cagacgacggccagtgtcgacatgaatgctatctggattgccgttgccgccgtgagcctaacacttcttgcggcgatggttcctggctcttcgatcaccattcccgtgcgtatcattcccgtggaacaccatgctcgtggatcctacggtcattcagc

SEQ ID NO: 2627 - DNA, 158 bp, synthetic construct
  misc_feature 1..158: note = Synthetic nucleic acid
  source 1..158: mol_type = other DNA
cagacgacggccagtgtcgacatgagtgaaaaaagcattgttcaggaagcgcgggatattcaaacacttcttgcggcgatggttcctggctcttcgatcccacaactgctggatgaacagagagtacaggctgtttctggatcctacggtcattcagc

SEQ ID NO: 2628 - DNA, 158 bp, synthetic construct
  misc_feature 1..158: note = Synthetic nucleic acid
  source 1..158: mol_type = other DNA
cagacgacggccagtgtcgacatggatctcaatacacttatctcacaatatggttatgccgcgctggtaacacttcttgcggcgatggttcctggctcttcgatccgcgggaagaaaaagccggatcatcaggcgggatcctacggtcattcagccgc

SEQ ID NO: 2629 - DNA, 158 bp, synthetic construct
  misc_feature 1..158: note = Synthetic nucleic acid
  source 1..158: mol_type = other DNA
cagacgacggccagtgtcgacatgtaccaggatcttattcgtaacgaactgaacgaagcggcaacacttcttgcggcgatggttcctggctcttcgatcatcctgatccagttgattgaaaaagagatggttaagataggatcctacggtcattcagc

SEQ ID NO: 2630 - DNA, 158 bp, synthetic construct
  misc_feature 1..158: note = Synthetic nucleic acid
  source 1..158: mol_type = other DNA
cagacgacggccagtgtcgacatgtcagccatcgactgtataattaccgctgccggattataacacttcttgcggcgatggttcctggctcttcgatccgactttattacagcgaaggaaaggtatactgaaatttcaggatcctacggtcattcagc

SEQ ID NO: 2631 - DNA, 158 bp, synthetic construct
  misc_feature 1..158: note = Synthetic nucleic acid
  source 1..158: mol_type = other DNA
cagacgacggccagtgtcgacatgtctatacagaacgaaatgcctggttacaacgaaatgaaccagtatctaacacttcttgcggcgatggttcctggctcttcgatcccagaagtacaaaaaccgactctacacaagggatcctacggtcattcagc

SEQ ID NO: 2632 - DNA, 158 bp, synthetic construct
  misc_feature 1..158: note = Synthetic nucleic acid
  source 1..158: mol_type = other DNA
cagacgacggccagtgtcgacatgttcaaaaaaatcctcttcccgttagttgctctgtttatgcttgcaaacacttcttgcggcgatggttcctggctcttcgatctccacgaattcatcaagcagaacgcgcgtgcaggatcctacggtcattcagc

SEQ ID NO: 2633 - DNA, 158 bp, synthetic construct
  misc_feature 1..158: note = Synthetic nucleic acid
  source 1..158: mol_type = other DNA
cagacgacggccagtgtcgacgtggaataccgtagcctgacgcttgatgattttttatcgcgctttaacacttcttgcggcgatggttcctggctcttcgatcgtgagctggcgctgcaaattggtgtgaaacccataggatcctacggtcattcagc

SEQ ID NO: 2634 - DNA, 158 bp, synthetic construct
  misc_feature 1..158: note = Synthetic nucleic acid
  source 1..158: mol_type = other DNA
cagacgacggccagtgtcgacatgaaaaaaagcctgcttggtttaaccttcgcgtccctaacacttcttgcggcgatggttcctggctcttcgatcgtggatctgattatttcagtggaaggcgtacagcagaagaggggatcctacggtcattcagc

SEQ ID NO: 2635 - DNA, 158 bp, synthetic construct
  misc_feature 1..158: note = Synthetic nucleic acid
  source 1..158: mol_type = other DNA
cagacgacggccagtgtcgacatgaaatcgctgcgtttaatgttatgcgctatgccattgataacacttcttgcggcgatggttcctggctcttcgatcaaaaactggaaagtcagtaaaattatctggcggcgtcacggatcctacggtcattcagc

SEQ ID NO: 2636 - DNA, 158 bp, synthetic construct
  misc_feature 1..158: note = Synthetic nucleic acid
  source 1..158: mol_type = other DNA
cagacgacggccagtgtcgacatgaaggcattatcgccaatcgcagtccttatttccgcaacacttcttgcggcgatggttcctggctcttcgatcggcgtgaagcgggtaactacggcgtttacgtttattaaaggatcctacggtcattcagccgc

SEQ ID NO: 2637 - DNA, 158 bp, synthetic construct
  misc_feature 1..158: note = Synthetic nucleic acid
  source 1..158: mol_type = other DNA
cagacgacggccagtgtcgacatgagcgagcagttaacggaccaggtcctggttgaaaacacttcttgcggcgatggttcctggctcttcgatcgggaagctattgataacaaagttcaaccgcttatcaggcgttgtggatcctacggtcattcagc

SEQ ID NO: 2638 - DNA, 158 bp, synthetic construct
  misc_feature 1..158: note = Synthetic nucleic acid
  source 1..158: mol_type = other DNA
cagacgacggccagtgtcgacatgagtaaagccagacgttgggttatcattgtgctatcactggaacacttcttgcggcgatggttcctggctcttcgatcatcctatgaaattcaaaacaaacaaactcagcctaatggatcctacggtcattcagc

SEQ ID NO: 2639 - DNA, 158 bp, synthetic construct
  misc_feature 1..158: note = Synthetic nucleic acid
  source 1..158: mol_type = other DNA
cagacgacggccagtgtcgacatgatccgtatttccgatgctgcacaagcgcactttgccaaactaacacttcttgcggcgatggttcctggctcttcgatcaccgaacaccagcgcggcgaacactcctactacaacggatcctacggtcattcagc

SEQ ID NO: 2640 - DNA, 158 bp, synthetic construct
  misc_feature 1..158: note = Synthetic nucleic acid
  source 1..158: mol_type = other DNA
cagacgacggccagtgtcgacatgcccctcttacacctgctccgccagaatccgaacacttcttgcggcgatggttcctggctcttcgatcccaccacgaataccggggtctggacgttagcgaaaaaattacttctgggatcctacggtcattcagc

SEQ ID NO: 2641 - DNA, 158 bp, synthetic construct
  misc_feature 1..158: note = Synthetic nucleic acid
  source 1..158: mol_type = other DNA
cagacgacggccagtgtcgacatgcgtgtcatcaccctggcgggtagtcctcgctttaacacttcttgcggcgatggttcctggctcttcgatcaggttcctgaccttctgtctctgcgaggtaatgcccatgcgatgggatcctacggtcattcagc

SEQ ID NO: 2642 - DNA, 158 bp, synthetic construct
  misc_feature 1..158: note = Synthetic nucleic acid
  source 1..158: mol_type = other DNA
cagacgacggccagtgtcgacatggaatactttgatatgcgtaaaatgtcggtgaatctgtggcgaaataacacttcttgcggcgatggttcctggctcttcgatctcgctggtcattcgccggatcaagttcagctcggatcctacggtcattcagc

SEQ ID NO: 2643 - DNA, 158 bp, synthetic construct
  misc_feature 1..158: note = Synthetic nucleic acid
  source 1..158: mol_type = other DNA
cagacgacggccagtgtcgacatggcattcagaatgagtgaacaaccacggaccataaaaatttataatctgctaacacttcttgcggcgatggttcctggctcttcgatcgatattgaatggccagcactgccgacaggatcctacggtcattcagc

SEQ ID NO: 2644 - DNA, 158 bp, synthetic construct
  misc_feature 1..158: note = Synthetic nucleic acid
  source 1..158: mol_type = other DNA
cagacgacggccagtgtcgacatggcattcagaatgagtgaacaaccacggaccataaaaatttataatctgctaacacttcttgcggcgatggttcctggctcttcgatcgatattgaatggccagcactgccgtccggatcctacggtcattcagc

SEQ ID NO: 2645 - DNA, 158 bp, synthetic construct
  misc_feature 1..158: note = Synthetic nucleic acid
  source 1..158: mol_type = other DNA
cagacgacggccagtgtcgacgtgcaacgtgaagatgtactgggagaagccctgaaattattagaattacaaggaacacttcttgcggcgatggttcctggctcttcgatctgccgccagggtggtgcattgaccagtggatcctacggtcattcagc

SEQ ID NO: 2646 - DNA, 158 bp, synthetic construct
  misc_feature 1..158: note = Synthetic nucleic acid
  source 1..158: mol_type = other DNA
cagacgacggccagtgtcgacatgaaactcgtgcacatggccagtggtttagcggttgcaacacttcttgcggcgatggttcctggctcttcgatcgtgaatccgtcttcggcagttccagctcctacgcaatattttggatcctacggtcattcagc

SEQ ID NO: 2647 - DNA, 158 bp, synthetic construct
  misc_feature 1..158: note = Synthetic nucleic acid
  source 1..158: mol_type = other DNA
cagacgacggccagtgtcgacatgccaagagcgaacgaaattaaaaaaggtatggtactgaattacaacggaacacttcttgcggcgatggttcctggctcttcgatcgaacgccgttatatggggcgtgctgacttcggatcctacggtcattcagc

SEQ ID NO: 2648 - DNA, 158 bp, synthetic construct
  misc_feature 1..158: note = Synthetic nucleic acid
  source 1..158: mol_type = other DNA
cagacgacggccagtgtcgacatgttcaaatcgaccctggcggcgatggctgctgttttaacacttcttgcggcgatggttcctggctcttcgatctcaaaaccggtagttatcctttccgctaaagtcctgccgcggggatcctacggtcattcagc

SEQ ID NO: 2649 - DNA, 158 bp, synthetic construct
  misc_feature 1..158: note = Synthetic nucleic acid
  source 1..158: mol_type = other DNA
cagacgacggccagtgtcgacgtgaataataacctgcaaagagacgctatcgcagctgcgatagatgttaacacttcttgcggcgatggttcctggctcttcgatcccctgacgggtgaactgtttcgacaggggtgcggatcctacggtcattcagc

SEQ ID NO: 2650 - DNA, 158 bp, synthetic construct
  misc_feature 1..158: note = Synthetic nucleic acid
  source 1..158: mol_type = other DNA
cagacgacggccagtgtcgacttgacactgtcatcgcaacattatctggtgatcactgcgttaacacttcttgcggcgatggttcctggctcttcgatcaattattcccaacatgatgaacaggatggagttaagcttggatcctacggtcattcagc

SEQ ID NO: 2651 - DNA, 158 bp, synthetic construct
  misc_feature 1..158: note = Synthetic nucleic acid
  source 1..158: mol_type = other DNA
cagacgacggccagtgtcgacatgaaacgactcattgtaggcatcagcggtgccagcggcgcaacacttcttgcggcgatggttcctggctcttcgatccttcctgaagatctctttgcccgctggcagggcgcaaatggatcctacggtcattcagc

SEQ ID NO: 2652 - DNA, 158 bp, synthetic construct
  misc_feature 1..158: note = Synthetic nucleic acid
  source 1..158: mol_type = other DNA
cagacgacggccagtgtcgacatgagccgattcatccccatagaattacaccatgccagccgtctgttaaataacacttcttgcggcgatggttcctggctcttcgatcccagcggcaagcgtgttacggcgggtgctggatcctacggtcattcagc

SEQ ID NO: 2653 - DNA, 158 bp, synthetic construct
  misc_feature 1..158: note = Synthetic nucleic acid
  source 1..158: mol_type = other DNA
cagacgacggccagtgtcgacatgaacatgacaaaaggtgcactcatcctcagcctttcatttttgaacacttcttgcggcgatggttcctggctcttcgatccggtgagtcaggtaacacctgagctggtcaaaataggatcctacggtcattcagc

SEQ ID NO: 2654 - DNA, 158 bp, synthetic construct
  misc_feature 1..158: note = Synthetic nucleic acid
  source 1..158: mol_type = other DNA
cagacgacggccagtgtcgacatgaatacgttgactttcctgctttcaacggtcattgagctgtataccataacacttcttgcggcgatggttcctggctcttcgatcctgctgccagggctgtggatggcgttactcggatcctacggtcattcagc

SEQ ID NO: 2655 - DNA, 158 bp, synthetic construct
  misc_feature 1..158: note = Synthetic nucleic acid
  source 1..158: mol_type = other DNA
cagacgacggccagtgtcgacatgaatatcactgctactgttcttcttgcgtttggtatgtcgatggataacacttcttgcggcgatggttcctggctcttcgatctccagatcctctggacgcacttccacggtaccggatcctacggtcattcagc

SEQ ID NO: 2656 - DNA, 158 bp, synthetic construct
  misc_feature 1..158: note = Synthetic nucleic acid
  source 1..158: mol_type = other DNA
cagacgacggccagtgtcgacatgagcaaagcaggtgcgtcgcttgcgacctgttacggaacacttcttgcggcgatggttcctggctcttcgatcgcgcagggcaaactggatgaagccaaagggcaatcgatacttggatcctacggtcattcagc

SEQ ID NO: 2657 - DNA, 158 bp, synthetic construct
  misc_feature 1..158: note = Synthetic nucleic acid
  source 1..158: mol_type = other DNA
cagacgacggccagtgtcgacatgagcgtattacgttcgttattaactgccggggtgctggcgtcaacacttcttgcggcgatggttcctggctcttcgatcccggcgtctgttccgttgcttaaggagcagccagtaggatcctacggtcattcagc

SEQ ID NO: 2658 - DNA, 158 bp, synthetic construct
  misc_feature 1..158: note = Synthetic nucleic acid
  source 1..158: mol_type = other DNA
cagacgacggccagtgtcgacatgcttgaacttaatgctaaaaccactgcgctggtggtgatcgatttaaacacttcttgcggcgatggttcctggctcttcgatcgtagcgtggaagagatcctcaacgcgttaattggatcctacggtcattcagc

SEQ ID NO: 2659 - DNA, 158 bp, synthetic construct
  misc_feature 1..158: note = Synthetic nucleic acid
  source 1..158: mol_type = other DNA
cagacgacggccagtgtcgacatggcaacgtactatagcaacgattttcgtgctggtcttaaaatcataacacttcttgcggcgatggttcctggctcttcgatccgctctggtgaatacgtctctcgcgtgaagttgggatcctacggtcattcagc

SEQ ID NO: 2660 - DNA, 158 bp, synthetic construct
  misc_feature 1..158: note = Synthetic nucleic acid
  source 1..158: mol_type = other DNA
cagacgacggccagtgtcgacatggcgaactggcaatctatcgacgagctgcaggatattgcataacacttcttgcggcgatggttcctggctcttcgatccattgaagagatcgttgccagcgagcagtcggcgttaggatcctacggtcattcagc

SEQ ID NO: 2661 - DNA, 158 bp, synthetic construct
  misc_feature 1..158: note = Synthetic nucleic acid
  source 1..158: mol_type = other DNA
cagacgacggccagtgtcgacatgggcaacactaagttggctaatccggcaccgctgggaacacttcttgcggcgatggttcctggctcttcgatccagtttggtcgcaccgttctgccgattggtgaatcccacttaggatcctacggtcattcagc

SEQ ID NO: 2662 - DNA, 158 bp, synthetic construct
  misc_feature 1..158: note = Synthetic nucleic acid
  source 1..158: mol_type = other DNA
cagacgacggccagtgtcgacatggtcaaatctcaaccgattttgagatatatcttgcgcgggattcccgcgattaacacttcttgcggcgatggttcctggctcttcgatccacgccgggttctcagccgcagcctgggatcctacggtcattcagc

SEQ ID NO: 2663 - DNA, 158 bp, synthetic construct
  misc_feature 1..158: note = Synthetic nucleic acid
  source 1..158: mol_type = other DNA
cagacgacggccagtgtcgacatgtacgagcgttatgcaggtttaatttttgatatggatggcacaatcctaacacttcttgcggcgatggttcctggctcttcgatcatggacgccgtggatgttcgcttgctgttaggatcctacggtcattcagc

SEQ ID NO: 2664 - DNA, 158 bp, synthetic construct
  misc_feature 1..158: note = Synthetic nucleic acid
  source 1..158: mol_type = other DNA
cagacgacggccagtgtcgacatgtcattcacaaatacccctgaacgctatggtgttatatctgcgaacacttcttgcggcgatggttcctggctcttcgatctgctgggaaagtcgtcatctgactatggagtaggcggatcctacggtcattcagc

SEQ ID NO: 2665 - DNA, 158 bp, synthetic construct
  misc_feature 1..158: note = Synthetic nucleic acid
  source 1..158: mol_type = other DNA
cagacgacggccagtgtcgacatgtctgaaaaattgcaggtggttacgttactggggagcaacacttcttgcggcgatggttcctggctcttcgatctgaccgcatttggtgagtttattcagcgagttaagatcggcggatcctacggtcattcagc

SEQ ID NO: 2666 - DNA, 158 bp, synthetic construct
  misc_feature 1..158: note = Synthetic nucleic acid
  source 1..158: mol_type = other DNA
cagacgacggccagtgtcgacatgtttaaaggacaaaaaacattggccgcactggccgtataacacttcttgcggcgatggttcctggctcttcgatcagtaaccgctaacgcaacctacgtgctggattataaaatgggatcctacggtcattcagc

SEQ ID NO: 2667 - DNA, 158 bp, synthetic construct
  misc_feature 1..158: note = Synthetic nucleic acid
  source 1..158: mol_type = other DNA
cagacgacggccagtgtcgacatgaaaaagtggctagtgacgattgcagcactgtggctaacacttcttgcggcgatggttcctggctcttcgatcgaagccgcttctattgcacaagagataaagcgtctacctctaggatcctacggtcattcagc

SEQ ID NO: 2668 - DNA, 158 bp, synthetic construct
  misc_feature 1..158: note = Synthetic nucleic acid
  source 1..158: mol_type = other DNA
cagacgacggccagtgtcgacatgaaccttgacgacaaatcgctgtttcttgacgccatggaagatgtccaaacacttcttgcggcgatggttcctggctcttcgatctgggagcgccacgctaagcgcagtcgtgccggatcctacggtcattcagc

SEQ ID NO: 2669 - DNA, 158 bp, synthetic construct
  misc_feature 1..158: note = Synthetic nucleic acid
  source 1..158: mol_type = other DNA
cagacgacggccagtgtcgacatgagtaagtttgttaaaacagctattgctgcggcaatggtgataacacttcttgcggcgatggttcctggctcttcgatcgaagcaaataccaccttccagattacttacctgtcaggatcctacggtcattcagc

SEQ ID NO: 2670 - DNA, 158 bp, synthetic construct
  misc_feature 1..158: note = Synthetic nucleic acid
  source 1..158: mol_type = other DNA
cagacgacggccagtgtcgacatgatagaaaccattactcatggtgcagagtggtttatcgggctaacacttcttgcggcgatggttcctggctcttcgatcgaacaaaaagttcacctggcaggagcaacatcaggaggatcctacggtcattcagc

SEQ ID NO: 2671 - DNA, 158 bp, synthetic construct
  misc_feature 1..158: note = Synthetic nucleic acid
  source 1..158: mol_type = other DNA
cagacgacggccagtgtcgacatgcctgtaaaagagcaaggtttttctctgctggaagtgttaacacttcttgcggcgatggttcctggctcttcgatcgtgaatgccagctatagcgtgacaggattcaacctgggcggatcctacggtcattcagc

SEQ ID NO: 2672 - DNA, 158 bp, synthetic construct
  misc_feature 1..158: note = Synthetic nucleic acid
  source 1..158: mol_type = other DNA
cagacgacggccagtgtcgacatggaacgttgcggctgggtgagtcaggacccaacacttcttgcggcgatggttcctggctcttcgatcaatgatcatgtggttggctgctgttgctatccgggaaataaaccatcgggatcctacggtcattcagc

SEQ ID NO: 2673 - DNA, 158 bp, synthetic construct
  misc_feature 1..158: note = Synthetic nucleic acid
  source 1..158: mol_type = other DNA
cagacgacggccagtgtcgacatggcgggtgaaagctttattttgatgggcgtttcagggagtggtaaaacattaattaacacttcttgcggcgatggttcctggctcttcgatccctcagatcagcgctgcgaactaggatcctacggtcattcagc

SEQ ID NO: 2674 - DNA, 158 bp, synthetic construct
  misc_feature 1..158: note = Synthetic nucleic acid
  source 1..158: mol_type = other DNA
cagacgacggccagtgtcgacatgaacaagtttttatttgccgctgcattgatcgtcagtggaacacttcttgcggcgatggttcctggctcttcgatcgtgaagccaggcgaaattgtcattccatttactgatacgggatcctacggtcattcagc

SEQ ID NO: 2675 - DNA, 158 bp, synthetic construct
  misc_feature 1..158: note = Synthetic nucleic acid
  source 1..158: mol_type = other DNA
cagacgacggccagtgtcgacatgagcaaatcattacaaaaacccaccattctgaatgttgaaactgtagcaacacttcttgcggcgatggttcctggctcttcgatcgaatggttgaaagggcaggggcgagtgaaaggatcctacggtcattcagc

SEQ ID NO: 2676 - DNA, 158 bp, synthetic construct
  misc_feature 1..158: note = Synthetic nucleic acid
  source 1..158: mol_type = other DNA
cagacgacggccagtgtcgacatgccaagcgcccacagtgttaagctacgcccgctgaacacttcttgcggcgatggttcctggctcttcgatcacaaaacaccgggtcagactctcctgaagccgaccgcacaatgtggatcctacggtcattcagc

SEQ ID NO: 2677 - DNA, 158 bp, synthetic construct
  misc_feature 1..158: note = Synthetic nucleic acid
  source 1..158: mol_type = other DNA
cagacgacggccagtgtcgacatgaaattcaaaacaaacaaactcagccttaatcttgtgcttgccagctaacacttcttgcggcgatggttcctggctcttcgatcccagaccccggcacagaagaagggtaatagaggatcctacggtcattcagc

SEQ ID NO: 2678 - DNA, 158 bp, synthetic construct
  misc_feature 1..158: note = Synthetic nucleic acid
  source 1..158: mol_type = other DNA
cagacgacggccagtgtcgacatgaagcgcaaagtattgttaattccgttgattatcttcctggcgattaacacttcttgcggcgatggttcctggctcttcgatcgggagaaatacagtaaggaggccgcacaaccaggatcctacggtcattcagc

SEQ ID NO: 2679 - DNA, 158 bp, synthetic construct
  misc_feature 1..158: note = Synthetic nucleic acid
  source 1..158: mol_type = other DNA
cagacgacggccagtgtcgacatgagtgatgagggactggcgccaggaaaacgcttgtaacacttcttgcggcgatggttcctggctcttcgatctatttgccgaattatcagcgcccatacgcccaccacgtttagtggatcctacggtcattcagc

SEQ ID NO: 2680 - DNA, 158 bp, synthetic construct
  misc_feature 1..158: note = Synthetic nucleic acid
  source 1..158: mol_type = other DNA
cagacgacggccagtgtcgacatgatgggaaaactgatttggttaatggggccgtccggctaacacttcttgcggcgatggttcctggctcttcgatcgctgatccatcagaaggagaaacaccatgcctgcttgagtggatcctacggtcattcagc

SEQ ID NO: 2681 - DNA, 158 bp, synthetic construct
  misc_feature 1..158: note = Synthetic nucleic acid
  source 1..158: mol_type = other DNA
cagacgacggccagtgtcgacatgcgcaatctggttaaatatgtcggaattggcctgctaacacttcttgcggcgatggttcctggctcttcgatcaccaccgcagaaaacatcattaatacgctggttattcagttgggatcctacggtcattcagc

SEQ ID NO: 2682 - DNA, 158 bp, synthetic construct
  misc_feature 1..158: note = Synthetic nucleic acid
  source 1..158: mol_type = other DNA
cagacgacggccagtgtcgacgtgattagcgatatcagaaaagatgctgaagtacgcatggacaaatgaacacttcttgcggcgatggttcctggctcttcgatcgcagacaaagaagcagaactgatgcagttccaaggatcctacggtcattcagc

SEQ ID NO: 2683 - DNA, 158 bp, synthetic construct
  misc_feature 1..158: note = Synthetic nucleic acid
  source 1..158: mol_type = other DNA
cagacgacggccagtgtcgacgtgggtaagcatcactggaaaatagaaaaacagcctgagtggtaaacacttcttgcggcgatggttcctggctcttcgatctcgattgcttctggttgtggagaaactaacgcacgtggatcctacggtcattcagc

SEQ ID NO: 2684 - DNA, 158 bp, synthetic construct
  misc_feature 1..158: note = Synthetic nucleic acid
  source 1..158: mol_type = other DNA
cagacgacggccagtgtcgacatgaacgagttttctatcctctgtcgtgtgctgggttcgaacacttcttgcggcgatggttcctggctcttcgatcgtgcaatgtgggacgagctggaagaagattctgaagaatttggatcctacggtcattcagc

SEQ ID NO: 2685 - DNA, 158 bp, synthetic construct
  misc_feature 1..158: note = Synthetic nucleic acid
  source 1..158: mol_type = other DNA
cagacgacggccagtgtcgacatgaccctacgcaagattctggcactcacctgcctgctaacacttcttgcggcgatggttcctggctcttcgatcgtgcagcaagtgatggacctgctgcaaaagttgctcaaattaggatcctacggtcattcagc

SEQ ID NO: 2686 - DNA, 158 bp, synthetic construct
  misc_feature 1..158: note = Synthetic nucleic acid
  source 1..158: mol_type = other DNA
cagacgacggccagtgtcgacatgatgtctcagccagcgaaagttttgctgctgtatgcccatccggaataacacttcttgcggcgatggttcctggctcttcgatcggcaaatccgctgtctccaggaggccgctacggatcctacggtcattcagc

SEQ ID NO: 2687 - DNA, 158 bp, synthetic construct
  misc_feature 1..158: note = Synthetic nucleic acid
  source 1..158: mol_type = other DNA
cagacgacggccagtgtcgacatgcttattggctatgtacgcgtatcaacaaatgaccagaacacaaacacttcttgcggcgatggttcctggctcttcgatcctttgtataagaggtttcctgcaggggataaattgggatcctacggtcattcagc

SEQ ID NO: 2688 - DNA, 158 bp, synthetic construct
  misc_feature 1..158: note = Synthetic nucleic acid
  source 1..158: mol_type = other DNA
cagacgacggccagtgtcgacatggagttcgctttttatatctgtggcctgatagccatacttgcgaaacacttcttgcggcgatggttcctggctcttcgatccagcgcgaaaagaaaaacggaggagcacgcagttggatcctacggtcattcagc

SEQ ID NO: 2689 - DNA, 158 bp, synthetic construct
  misc_feature 1..158: note = Synthetic nucleic acid
  source 1..158: mol_type = other DNA
cagacgacggccagtgtcgacatggcaaagtacaacgaaaaagagctggcggatacgagcaaaacacttcttgcggcgatggttcctggctcttcgatcctgacatcaacggttgcggttgagtttcttgagtggttaggatcctacggtcattcagc

SEQ ID NO: 2690 - DNA, 158 bp, synthetic construct
  misc_feature 1..158: note = Synthetic nucleic acid
  source 1..158: mol_type = other DNA
cagacgacggccagtgtcgacatgtctgatgttttacgcccataccgcgatctttttccacaaataacacttcttgcggcgatggttcctggctcttcgatcgaatatctggatcagggtaaccagacccagcctcaaggatcctacggtcattcagc

SEQ ID NO: 2691 - DNA, 158 bp, synthetic construct
  misc_feature 1..158: note = Synthetic nucleic acid
  source 1..158: mol_type = other DNA
cagacgacggccagtgtcgacgtgatgaaactgatgtttgcatcggacattcatgggtcgttaaacacttcttgcggcgatggttcctggctcttcgatcatcaaagtatcattgcgcaggtcgcgattaatccggtgggatcctacggtcattcagc

SEQ ID NO: 2692 - DNA, 158 bp, synthetic construct
  misc_feature 1..158: note = Synthetic nucleic acid
  source 1..158: mol_type = other DNA
cagacgacggccagtgtcgacatgaaaaagaaaacaacacttagcgaggaggaccaggctctgtttcgccaaacacttcttgcggcgatggttcctggctcttcgatcgaagagtggctgccgccggagttgcccacaggatcctacggtcattcagc

SEQ ID NO: 2693 - DNA, 158 bp, synthetic construct
  misc_feature 1..158: note = Synthetic nucleic acid
  source 1..158: mol_type = other DNA
cagacgacggccagtgtcgacatgaccgcgactgcacagcagcttgagtatctcaaaaatagcatcaaaaaacacttcttgcggcgatggttcctggctcttcgatcctacagccttgtcccgttcccgggccatatcggatcctacggtcattcagc

SEQ ID NO: 2694 - DNA, 158 bp, synthetic construct
  misc_feature 1..158: note = Synthetic nucleic acid
  source 1..158: mol_type = other DNA
cagacgacggccagtgtcgacatgaccgcgtattggctggcccagggcgtgggtaacacttcttgcggcgatggttcctggctcttcgatccgtttaaagttgagaaaaccccttccgccgtagacgaaaggggtttcggatcctacggtcattcagc

SEQ ID NO: 2695 - DNA, 158 bp, synthetic construct
  misc_feature 1..158: note = Synthetic nucleic acid
  source 1..158: mol_type = other DNA
cagacgacggccagtgtcgacatgactaagcagcccgaagactggctcgacgacgttaacacttcttgcggcgatggttcctggctcttcgatcagattttccagtatctgcgcgagttagcggagaacgaagggtgcggatcctacggtcattcagc

SEQ ID NO: 2696 - DNA, 158 bp, synthetic construct
  misc_feature 1..158: note = Synthetic nucleic acid
  source 1..158: mol_type = other DNA
cagacgacggccagtgtcgacatgatggtgcagcacctgaaaagacggccattaaaacacttcttgcggcgatggttcctggctcttcgatcacttgtgcagaaatcctccagcctgccttcttctgatatatatgagggatcctacggtcattcagc

SEQ ID NO: 2697 - DNA, 158 bp, synthetic construct
  misc_feature 1..158: note = Synthetic nucleic acid
  source 1..158: mol_type = other DNA
cagacgacggccagtgtcgacatgcaaacgaaaaaaaatgaaatttgggtgggtatctttttattagcagcactaacacttcttgcggcgatggttcctggctcttcgatcactgaacctgtgggtacaacgaaatcaggatcctacggtcattcagc

SEQ ID NO: 2698 - DNA, 158 bp, synthetic construct
  misc_feature 1..158: note = Synthetic nucleic acid
  source 1..158: mol_type = other DNA
cagacgacggccagtgtcgacatgcaagattccattctgacgaccgtagtgaaagatatcgacgaacacttcttgcggcgatggttcctggctcttcgatctgtgatggaaagcattaaactggcgttggcaaaaatgggatcctacggtcattcagc

SEQ ID NO: 2699 - DNA, 158 bp, synthetic construct
  misc_feature 1..158: note = Synthetic nucleic acid
  source 1..158: mol_type = other DNA
cagacgacggccagtgtcgacatgcacctgcttcctgaactcgccagccaccatgcgaacacttcttgcggcgatggttcctggctcttcgatctggaggcactgctgaacgatgtcgatgcctgcaacgtcaacctaggatcctacggtcattcagc

SEQ ID NO: 2700 - DNA, 158 bp, synthetic construct
  misc_feature 1..158: note = Synthetic nucleic acid
  source 1..158: mol_type = other DNA
cagacgacggccagtgtcgacatggatgcactcgaactattgatcaatcgccgtagcgcaacacttcttgcggcgatggttcctggctcttcgatcattaacgtcccggacccgacgccgtttgtaacttatttctctggatcctacggtcattcagc

SEQ ID NO: 2701 - DNA, 158 bp, synthetic construct
  misc_feature 1..158: note = Synthetic nucleic acid
  source 1..158: mol_type = other DNA
cagacgacggccagtgtcgacatgtccgcttttaaaaagtcacttcttgttgctggcgtagaacacttcttgcggcgatggttcctggctcttcgatccgtttacgctcaggctgactacaagattgcttacgaggtgggatcctacggtcattcagc

SEQ ID NO: 2702 - DNA, 158 bp, synthetic construct
  misc_feature 1..158: note = Synthetic nucleic acid
  source 1..158: mol_type = other DNA
cagacgacggccagtgtcgacatgttgttagaacaggggtggctggttggcgcgcgcaacacttcttgcggcgatggttcctggctcttcgatcattgggcacggtttcgtgtgctggtcagcaaggagacaacagtcggatcctacggtcattcagc

SEQ ID NO: 2703 - DNA, 158 bp, synthetic construct
  misc_feature 1..158: note = Synthetic nucleic acid
  source 1..158: mol_type = other DNA
cagacgacggccagtgtcgacatgaaaattaaaactctggcaatcgttgttctgtcggctctgtaacacttcttgcggcgatggttcctggctcttcgatctaatgcggatgcgaccttcaaggttcagtatcaatttggatcctacggtcattcagc

SEQ ID NO: 2704 - DNA, 158 bp, synthetic construct
  misc_feature 1..158: note = Synthetic nucleic acid
  source 1..158: mol_type = other DNA
cagacgacggccagtgtcgacatgaacagtacacaccactacgagcagttgattgaaatttttaatagctgctttaacacttcttgcggcgatggttcctggctcttcgatctcccgtggccggaagcgctcaacggatcctacggtcattcagccgc

SEQ ID NO: 2705 - DNA, 158 bp, synthetic construct
  misc_feature 1..158: note = Synthetic nucleic acid
  source 1..158: mol_type = other DNA
cagacgacggccagtgtcgacatgattcggcaacgtcgtcgtgcgttaacgccggaacaaaacacttcttgcggcgatggttcctggctcttcgatcttcctgcggtggttacaccgtcgaaagtctgggagtggtccggatcctacggtcattcagc

SEQ ID NO: 2706 - DNA, 158 bp, synthetic construct
  misc_feature 1..158: note = Synthetic nucleic acid
  source 1..158: mol_type = other DNA
cagacgacggccagtgtcgacatgcaaacggaacacgtcattttattgaatgcacagggaaacacttcttgcggcgatggttcctggctcttcgatcaagccagaaaacgattatctgcatttacccagcttaaactcggatcctacggtcattcagc

SEQ ID NO: 2707 - DNA, 158 bp, synthetic construct
  misc_feature 1..158: note = Synthetic nucleic acid
  source 1..158: mol_type = other DNA
cagacgacggccagtgtcgacatgcaagatttaagcggtttctcggtgccgaaagggttccggaacacttcttgcggcgatggttcctggctcttcgatcccgcagtggtgatacgcgaacgcgttgaaactgaactcggatcctacggtcattcagc

SEQ ID NO: 2708 - DNA, 158 bp, synthetic construct
  misc_feature 1..158: note = Synthetic nucleic acid
  source 1..158: mol_type = other DNA
cagacgacggccagtgtcgacatgcaatttaatatccctacgttgcttacactgttccgtgtcatccttataacacttcttgcggcgatggttcctggctcttcgatcgctgcgcgtgcagatttgcttgatcagagcggatcctacggtcattcagc

SEQ ID NO: 2709 - DNA, 158 bp, synthetic construct
  misc_feature 1..158: note = Synthetic nucleic acid
  source 1..158: mol_type = other DNA
cagacgacggccagtgtcgacatggacaaattcgacgctaatcgccgcaaattgctggcgcttaacacttcttgcggcgatggttcctggctcttcgatcttgtgcatattgataccgggccagcacggcactggactggatcctacggtcattcagc

SEQ ID NO: 2710 - DNA, 158 bp, synthetic construct
  misc_feature 1..158: note = Synthetic nucleic acid
  source 1..158: mol_type = other DNA
cagacgacggccagtgtcgacatgggtttaccgccgcttagcaaaattcctttaattttacgtccaaacacttcttgcggcgatggttcctggctcttcgatcaggggctgtgccgtattcctgaaaaacgttctgagggatcctacggtcattcagc

SEQ ID NO: 2711 - DNA, 158 bp, synthetic construct
  misc_feature 1..158: note = Synthetic nucleic acid
  source 1..158: mol_type = other DNA
cagacgacggccagtgtcgacatgaaaacgattgaagttgatgatgaactctacagctatattgccagccaaacacttcttgcggcgatggttcctggctcttcgatcttgattgagaaggtttgcggaactatcccaggatcctacggtcattcagc

SEQ ID NO: 2712 - DNA, 158 bp, synthetic construct
  misc_feature 1..158: note = Synthetic nucleic acid
  source 1..158: mol_type = other DNA
cagacgacggccagtgtcgacatgacagtacaccacttcacttttcatatcacagataaaagtgatgccagtaacacttcttgcggcgatggttcctggctcttcgatcaccctgatgaaaccggagcactgacgttcggatcctacggtcattcagc

SEQ ID NO: 2713 - DNA, 158 bp, synthetic construct
  misc_feature 1..158: note = Synthetic nucleic acid
  source 1..158: mol_type = other DNA
cagacgacggccagtgtcgacatgagtgccaatgaaaacaacctgatttggatcgatcttgagatgaaacacttcttgcggcgatggttcctggctcttcgatcggcttactaccgcgagcattttatcaagctgggatcctacggtcattcagccgc

SEQ ID NO: 2714 - DNA, 158 bp, synthetic construct
  misc_feature 1..158: note = Synthetic nucleic acid
  source 1..158: mol_type = other DNA
cagacgacggccagtgtcgacatgatgattttggtgacggggggcgcacggagaacacttcttgcggcgatggttcctggctcttcgatcaatgaagtatggctggtggtttcgggtattggagtaaaaatcaaatcaggatcctacggtcattcagc

SEQ ID NO: 2715 - DNA, 158 bp, synthetic construct
  misc_feature 1..158: note = Synthetic nucleic acid
  source 1..158: mol_type = other DNA
cagacgacggccagtgtcgacatgctgaagttactgaaaactattatgcgcgccggaaccgaacacttcttgcggcgatggttcctggctcttcgatccgatacagatgtactgctggtggctaaggagcagctaatcggatcctacggtcattcagc

SEQ ID NO: 2716 - DNA, 158 bp, synthetic construct
  misc_feature 1..158: note = Synthetic nucleic acid
  source 1..158: mol_type = other DNA
cagacgacggccagtgtcgacatggaagtcaacaaaaagcagctggctgacattttcggtaacacttcttgcggcgatggttcctggctcttcgatctaccggggttgctgagtgaatatatcgaacagtcaggtggatcctacggtcattcagccgc

SEQ ID NO: 2717 - DNA, 158 bp, synthetic construct
  misc_feature 1..158: note = Synthetic nucleic acid
  source 1..158: mol_type = other DNA
cagacgacggccagtgtcgacatggcgcttaaagcgacaatttataaagcgacggttaatgtggaacacttcttgcggcgatggttcctggctcttcgatcggaagtgaacttaaccgcctggcaacaaccttcagaaggatcctacggtcattcagc

SEQ ID NO: 2718 - DNA, 158 bp, synthetic construct
  misc_feature 1..158: note = Synthetic nucleic acid
  source 1..158: mol_type = other DNA
cagacgacggccagtgtcgacatgtctgaagctcctaaaaagcgctggtacgtcgttcaggcaacacttcttgcggcgatggttcctggctcttcgatcccggtagagctggacttcagccaggttgaaaaagccagaggatcctacggtcattcagc

SEQ ID NO: 2719 - DNA, 158 bp, synthetic construct
  misc_feature 1..158: note = Synthetic nucleic acid
  source 1..158: mol_type = other DNA
cagacgacggccagtgtcgacgtgaaaacattaattcttttctcaacaagggacggacaaacgcgcaacacttcttgcggcgatggttcctggctcttcgatctcgcccatttaaccgacaaaccgacgctgaaacgtggatcctacggtcattcagc

SEQ ID NO: 2720 - DNA, 158 bp, synthetic construct
  misc_feature 1..158: note = Synthetic nucleic acid
  source 1..158: mol_type = other DNA
cagacgacggccagtgtcgacgtggacgatttgaccgcacaagccctgaaagattttaaacacttcttgcggcgatggttcctggctcttcgatcaaatcttgcggaattccttaatcaacttaagcctcttctgttaggatcctacggtcattcagc

SEQ ID NO: 2721 - DNA, 158 bp, synthetic construct
  misc_feature 1..158: note = Synthetic nucleic acid
  source 1..158: mol_type = other DNA
cagacgacggccagtgtcgacatgaaaaaaattgcgctagcaggtctggccggaatgctgttgaacacttcttgcggcgatggttcctggctcttcgatcctgacggcccgtatgttggggttaacgccagtttcgcaggatcctacggtcattcagc

SEQ ID NO: 2722 - DNA, 158 bp, synthetic construct
  misc_feature 1..158: note = Synthetic nucleic acid
  source 1..158: mol_type = other DNA
cagacgacggccagtgtcgacatgaaacgttcaattattgctgccgctgtcttttcttctttttttatgagcaacacttcttgcggcgatggttcctggctcttcgatcctctggttatgcgtgtggcgcaggatagcggatcctacggtcattcagc

SEQ ID NO: 2723 - DNA, 158 bp, synthetic construct
  misc_feature 1..158: note = Synthetic nucleic acid
  source 1..158: mol_type = other DNA
cagacgacggccagtgtcgacatgaaattaagatttatttcgtctgcgctggctgccgcaaacacttcttgcggcgatggttcctggctcttcgatcaagcaaatgctgacgcgacttttattatgagatatgaacctggatcctacggtcattcagc

SEQ ID NO: 2724 - DNA, 158 bp, synthetic construct
  misc_feature 1..158: note = Synthetic nucleic acid
  source 1..158: mol_type = other DNA
cagacgacggccagtgtcgacatgaccttaaaagaattgttagtaggtttcggcacccaggttcgtaaacacttcttgcggcgatggttcctggctcttcgatccaagcctatcgacgtcaagagcctgttaccgcttggatcctacggtcattcagc

SEQ ID NO: 2725 - DNA, 158 bp, synthetic construct
  misc_feature 1..158: note = Synthetic nucleic acid
  source 1..158: mol_type = other DNA
cagacgacggccagtgtcgacatgattatctatttacacggttttgactctaacagtccgggtaaccacgaaacacttcttgcggcgatggttcctggctcttcgatccgcattaaagcgttcaaaaccctcgggctgggatcctacggtcattcagc

SEQ ID NO: 2726 - DNA, 158 bp, synthetic construct
  misc_feature 1..158: note = Synthetic nucleic acid
  source 1..158: mol_type = other DNA
cagacgacggccagtgtcgacatgcgaattaaaccagacgataactggcgttggtattacgatgaaaacacttcttgcggcgatggttcctggctcttcgatcatgttgacagcttcagcctcgaacaggcagtctgtggatcctacggtcattcagc

SEQ ID NO: 2727 - DNA, 158 bp, synthetic construct
  misc_feature 1..158: note = Synthetic nucleic acid
  source 1..158: mol_type = other DNA
cagacgacggccagtgtcgacatggaacagcgtcgtttggcaagtactgaatgggtggatattaacacttcttgcggcgatggttcctggctcttcgatcccaaaaatgaagccgtagagactgaaacggcagaaactggatcctacggtcattcagc

SEQ ID NO: 2728 - DNA, 158 bp, synthetic construct
  misc_feature 1..158: note = Synthetic nucleic acid
  source 1..158: mol_type = other DNA
cagacgacggccagtgtcgacatggcgaaatcagcactgttcacggtgcgtaataatgagtcctaacacttcttgcggcgatggttcctggctcttcgatccagtaaacaatgtggaaagccggtttcggcggaagccggatcctacggtcattcagc

SEQ ID NO: 2729 - DNA, 158 bp, synthetic construct
  misc_feature 1..158: note = Synthetic nucleic acid
  source 1..158: mol_type = other DNA
cagacgacggccagtgtcgacatgtttacctttatcaaaaaagtcatcaaaaccggcacggcgaaacacttcttgcggcgatggttcctggctcttcgatctattgaactgactcgccatatgaaagaggccatcattggatcctacggtcattcagc

SEQ ID NO: 2730 - DNA, 158 bp, synthetic construct
  misc_feature 1..158: note = Synthetic nucleic acid
  source 1..158: mol_type = other DNA
cagacgacggccagtgtcgacattaaaggcggaaaacgagttcaaacggcgcgccctaaaacacttcttgcggcgatggttcctggctcttcgatccgccagatgatcatggtgctcgctcctaagaagaaacagacaggatcctacggtcattcagc

SEQ ID NO: 2731 - DNA, 158 bp, synthetic construct
  misc_feature 1..158: note = Synthetic nucleic acid
  source 1..158: mol_type = other DNA
cagacgacggccagtgtcgacatgaaaaggaagagattatttctattagcgtcgttgctgccaatgtttgctaacacttcttgcggcgatggttcctggctcttcgatcaggcctggttctctttaacctatcagggaggatcctacggtcattcagc

SEQ ID NO: 2732 - DNA, 158 bp, synthetic construct
  misc_feature 1..158: note = Synthetic nucleic acid
  source 1..158: mol_type = other DNA
cagacgacggccagtgtcgacatgaaacaggaagtggaaaagtggcgaccttttggacataacacttcttgcggcgatggttcctggctcttcgatcacttattgagaaataagcagcttcctcagccctcaaaaagaggatcctacggtcattcagc

SEQ ID NO: 2733 - DNA, 158 bp, synthetic construct
  misc_feature 1..158: note = Synthetic nucleic acid
  source 1..158: mol_type = other DNA
cagacgacggccagtgtcgacatgaacccgccaattaattttttgccctggcgacaaacacttcttgcggcgatggttcctggctcttcgatcgagtatcagttaacaaggaaggttagcgatgaacatgttctttgtggatcctacggtcattcagc

SEQ ID NO: 2734 - DNA, 158 bp, synthetic construct
  misc_feature 1..158: note = Synthetic nucleic acid
  source 1..158: mol_type = other DNA
cagacgacggccagtgtcgacatgaagaaagtttttctttgcgccatcttagcctccttaagctatccaacacttcttgcggcgatggttcctggctcttcgatcgaagagaacaaatcggacagctggtttaatataggatcctacggtcattcagc

SEQ ID NO: 2735 - DNA, 158 bp, synthetic construct
  misc_feature 1..158: note = Synthetic nucleic acid
  source 1..158: mol_type = other DNA
cagacgacggccagtgtcgacatgaagcagtttcttgattttttaccgctggttgtctttttcgcaacacttcttgcggcgatggttcctggctcttcgatcatctaccgccacatgccgcaggaagataaatcccggggatcctacggtcattcagc

SEQ ID NO: 2736 - DNA, 158 bp, synthetic construct
  misc_feature 1..158: note = Synthetic nucleic acid
  source 1..158: mol_type = other DNA
cagacgacggccagtgtcgacatgaataaatcaatgattcagtccggtggttacgtcctgttagcgaacacttcttgcggcgatggttcctggctcttcgatcccgcctctttaactgcgacatttgagtatattgctggatcctacggtcattcagc

SEQ ID NO: 2737 - DNA, 158 bp, synthetic construct
  misc_feature 1..158: note = Synthetic nucleic acid
  source 1..158: mol_type = other DNA
cagacgacggccagtgtcgacatgaatactaacgtttttcgactgctcctgctgggaagcaacacttcttgcggcgatggttcctggctcttcgatcgctttgtacgtatccacgacattcaacctgttatgcagtttggatcctacggtcattcagc

SEQ ID NO: 2738 - DNA, 158 bp, synthetic construct
  misc_feature 1..158: note = Synthetic nucleic acid
  source 1..158: mol_type = other DNA
cagacgacggccagtgtcgacatgactgaaacgataaaagtaagcgaatcacttgaattacatgctgttgcaaacacttcttgcggcgatggttcctggctcttcgatctatacgcgcgtattatcgattcacaagacggatcctacggtcattcagc

SEQ ID NO: 2739 - DNA, 158 bp, synthetic construct
  misc_feature 1..158: note = Synthetic nucleic acid
  source 1..158: mol_type = other DNA
cagacgacggccagtgtcgacatgccacgtcgtcgcgtcattggtcagcgtaaaattctgaacacttcttgcggcgatggttcctggctcttcgatcgcgcttccagtaagcagcccgctttgggctacttaaataaaggatcctacggtcattcagc

SEQ ID NO: 2740 - DNA, 158 bp, synthetic construct
  misc_feature 1..158: note = Synthetic nucleic acid
  source 1..158: mol_type = other DNA
cagacgacggccagtgtcgacatggcaaaacttaccttacaagagcagttgctcaaagcaggattaaacacttcttgcggcgatggttcctggctcttcgatcccgacttcaaagtgcctgatgatttgatgtggatcggatcctacggtcattcagc

SEQ ID NO: 2741 - DNA, 158 bp, synthetic construct
  misc_feature 1..158: note = Synthetic nucleic acid
  source 1..158: mol_type = other DNA
cagacgacggccagtgtcgacatggcgaaactgcatgattactacaaagacgaagtagttaaaaaactcatgactaacacttcttgcggcgatggttcctggctcttcgatccctttgacttcccgttccgcaagcgaggatcctacggtcattcagc

SEQ ID NO: 2742 - DNA, 158 bp, synthetic construct
  misc_feature 1..158: note = Synthetic nucleic acid
  source 1..158: mol_type = other DNA
cagacgacggccagtgtcgacatgtcttccagagttttgaccccggacgtcgttggtattgaaacacttcttgcggcgatggttcctggctcttcgatcgaacctgacagccaaattccaccaggattcagagggctgggatcctacggtcattcagc

SEQ ID NO: 2743 - DNA, 158 bp, synthetic construct
  misc_feature 1..158: note = Synthetic nucleic acid
  source 1..158: mol_type = other DNA
cagacgacggccagtgtcgacgtgaataaatcaatgttggcgggtatcgggattggtgtcgaacacttcttgcggcgatggttcctggctcttcgatcagatagcaacgggcaactgattttgaataacaaagtattcggatcctacggtcattcagc

SEQ ID NO: 2744 - DNA, 158 bp, synthetic construct
  misc_feature 1..158: note = Synthetic nucleic acid
  source 1..158: mol_type = other DNA
cagacgacggccagtgtcgacatgaaacatactgtagaagtaatgatccccgaagcggagattaaagcgaacacttcttgcggcgatggttcctggctcttcgatcatatcggcaaagtgattctgctggacgaggagggatcctacggtcattcagc

SEQ ID NO: 2745 - DNA, 158 bp, synthetic construct
  misc_feature 1..158: note = Synthetic nucleic acid
  source 1..158: mol_type = other DNA
cagacgacggccagtgtcgacatgacgtatcaacaagctggacgcattgctgttttgaaaaaacacttcttgcggcgatggttcctggctcttcgatctgcaggttatgtgttcttttctctgcttgggtttattgccggatcctacggtcattcagc

SEQ ID NO: 2746 - DNA, 158 bp, synthetic construct
  misc_feature 1..158: note = Synthetic nucleic acid
  source 1..158: mol_type = other DNA
cagacgacggccagtgtcgacatgcgtcgcgctaacgatccgcaacggcgagaaaaaattataacacttcttgcggcgatggttcctggctcttcgatcgaggagattttgaggatggttgagagggttgcagggaatggatcctacggtcattcagc

SEQ ID NO: 2747 - DNA, 158 bp, synthetic construct
  misc_feature 1..158: note = Synthetic nucleic acid
  source 1..158: mol_type = other DNA
cagacgacggccagtgtcgacatggaaaatctcgctcgctttttatccaccacacttaaacaactacaacacttcttgcggcgatggttcctggctcttcgatcttttcattccctcatccattacccgcgcagtactggatcctacggtcattcagc

SEQ ID NO: 2748 - DNA, 158 bp, synthetic construct
  misc_feature 1..158: note = Synthetic nucleic acid
  source 1..158: mol_type = other DNA
cagacgacggccagtgtcgacatggccagcagaggcgtaaacaaggttattctcgttggtaataacacttcttgcggcgatggttcctggctcttcgatcagccgccgatggactttgatgatgacattccgttcatgggatcctacggtcattcagc

SEQ ID NO: 2749 - DNA, 158 bp, synthetic construct
  misc_feature 1..158: note = Synthetic nucleic acid
  source 1..158: mol_type = other DNA
cagacgacggccagtgtcgacatgttacgcgataaatttattcactattttcagcaatggcgtgaacgccagttaaaacacttcttgcggcgatggttcctggctcttcgatcgcggctggagtttggacgggggctcggatcctacggtcattcagc

SEQ ID NO: 2750 - DNA, 158 bp, synthetic construct
  misc_feature 1..158: note = Synthetic nucleic acid
  source 1..158: mol_type = other DNA
cagacgacggccagtgtcgacatgaaaacgcgtattcatgttgtgcagggtgatattaccaaactaacacttcttgcggcgatggttcctggctcttcgatctacgaaagactccttacccaacaaggagatgaatgcggatcctacggtcattcagc

SEQ ID NO: 2751 - DNA, 158 bp, synthetic construct
  misc_feature 1..158: note = Synthetic nucleic acid
  source 1..158: mol_type = other DNA
cagacgacggccagtgtcgacatgaacacaaaaatcagatacggcctgtcggctgccgttctaacacttcttgcggcgatggttcctggctcttcgatccaggagagcgcattaacctgctgggggatagaacagaaaggatcctacggtcattcagc

SEQ ID NO: 2752 - DNA, 158 bp, synthetic construct
  misc_feature 1..158: note = Synthetic nucleic acid
  source 1..158: mol_type = other DNA
cagacgacggccagtgtcgacatgcgcctgctccctctcgttgccgcagcgacaaacacttcttgcggcgatggttcctggctcttcgatcggtttgatgtcagtaaatttatttgggtacagcagcctggtagtatgggatcctacggtcattcagc

SEQ ID NO: 2753 - DNA, 158 bp, synthetic construct
  misc_feature 1..158: note = Synthetic nucleic acid
  source 1..158: mol_type = other DNA
cagacgacggccagtgtcgacatgtctcgtgttgctaaagcaccggtcgttgttcctgcaacacttcttgcggcgatggttcctggctcttcgatcgccgacgaagtcgtgcgtaccaaagaggctaagaagaagcagggatcctacggtcattcagc

SEQ ID NO: 2754 - DNA, 158 bp, synthetic construct
  misc_feature 1..158: note = Synthetic nucleic acid
  source 1..158: mol_type = other DNA
cagacgacggccagtgtcgacatgtctgaatttattacggtagctcgcccctacgccaaagcagcttttaacacttcttgcggcgatggttcctggctcttcgatcttgagcgccttgcagacgtcttgcagtctgagggatcctacggtcattcagc

SEQ ID NO: 2755 - DNA, 158 bp, synthetic construct
  misc_feature 1..158: note = Synthetic nucleic acid
  source 1..158: mol_type = other DNA
cagacgacggccagtgtcgacatgaaccgattctcaaaaactcaaatttatttacattggataacgctgcttttcgttaacacttcttgcggcgatggttcctggctcttcgatcgaatgatgcctcgccgcaaacgtggatcctacggtcattcagc

SEQ ID NO: 2756 - DNA, 158 bp, synthetic construct
  misc_feature 1..158: note = Synthetic nucleic acid
  source 1..158: mol_type = other DNA
cagacgacggccagtgtcgacatgagaaacaaacctttttatcttctgtgcgcttttttgtggctgaacacttcttgcggcgatggttcctggctcttcgatcatgccacggctaccttcactcttgaatatcagttcggatcctacggtcattcagc

SEQ ID NO: 2757 - DNA, 158 bp, synthetic construct
  misc_feature 1..158: note = Synthetic nucleic acid
  source 1..158: mol_type = other DNA
cagacgacggccagtgtcgacatgagcttactcaacgtccctgcgggtaaagatctgccgaacacttcttgcggcgatggttcctggctcttcgatcctgaaatcgttgcctccttcgagcgcgcaaagaataaaagtggatcctacggtcattcagc

SEQ ID NO: 2758 - DNA, 158 bp, synthetic construct
  misc_feature 1..158: note = Synthetic nucleic acid
  source 1..158: mol_type = other DNA
cagacgacggccagtgtcgacatgattcttataatttatgcgcatccgtatccgcatcattcccatgcgaataaaaacacttcttgcggcgatggttcctggctcttcgatcaatggcaggaggcccatcatggacagggatcctacggtcattcagc

SEQ ID NO: 2759 - DNA, 158 bp, synthetic construct
  misc_feature 1..158: note = Synthetic nucleic acid
  source 1..158: mol_type = other DNA
cagacgacggccagtgtcgacatggaaaataaatattcaaggttacaaatcagcattcactggctggtctttttactgaacacttcttgcggcgatggttcctggctcttcgatctgatgccgcgtaaacgttccggatcctacggtcattcagccgc

SEQ ID NO: 2760 - DNA, 158 bp, synthetic construct
  misc_feature 1..158: note = Synthetic nucleic acid
  source 1..158: mol_type = other DNA
cagacgacggccagtgtcgacatggatagttcgtttacgcccattgaacaaatgctaaaatttcgcgaacacttcttgcggcgatggttcctggctcttcgatcacaagacggtgtggttctcgaagcgatgagcaagggatcctacggtcattcagc

SEQ ID NO: 2761 - DNA, 158 bp, synthetic construct
  misc_feature 1..158: note = Synthetic nucleic acid
  source 1..158: mol_type = other DNA
cagacgacggccagtgtcgacatggctatcactggcatctttttcggcagcgaaacacttcttgcggcgatggttcctggctcttcgatcaaacagatttctgaagagttgcatctcgacgaaattctcaatgcccctggatcctacggtcattcagc

SEQ ID NO: 2762 - DNA, 158 bp, synthetic construct
  misc_feature 1..158: note = Synthetic nucleic acid
  source 1..158: mol_type = other DNA
cagacgacggccagtgtcgacatgtctgaaccgcaacgtctgttctttgctatcgacttacctgcagaaataacacttcttgcggcgatggttcctggctcttcgatcccgctaaaacgctgggcgctaacgcaagcaggatcctacggtcattcagc

SEQ ID NO: 2763 - DNA, 158 bp, synthetic construct
  misc_feature 1..158: note = Synthetic nucleic acid
  source 1..158: mol_type = other DNA
cagacgacggccagtgtcgacatgttgcgatttttgaaccaatgttcacaaggccggggcaacacttcttgcggcgatggttcctggctcttcgatcagccgtttaaagcgaaaaaacgtgatctgttcggtcgccggggatcctacggtcattcagc

SEQ ID NO: 2764 - DNA, 158 bp, synthetic construct
  misc_feature 1..158: note = Synthetic nucleic acid
  source 1..158: mol_type = other DNA
cagacgacggccagtgtcgacgtgacaactatagtaagcgtacgccgtaacggccataacacttcttgcggcgatggttcctggctcttcgatcccaaccatttccacaccatcgaagaattaagctacaaagcgatgggatcctacggtcattcagc

SEQ ID NO: 2765 - DNA, 158 bp, synthetic construct
  misc_feature 1..158: note = Synthetic nucleic acid
  source 1..158: mol_type = other DNA
cagacgacggccagtgtcgacgtgattgatgacgatggctaccgcccaaacgtaggtataacacttcttgcggcgatggttcctggctcttcgatcaaaccacaaaacgcatctgcttatcgacgtaaaagaggtttaggatcctacggtcattcagc

SEQ ID NO: 2766 - DNA, 158 bp, synthetic construct
  misc_feature 1..158: note = Synthetic nucleic acid
  source 1..158: mol_type = other DNA
cagacgacggccagtgtcgacatgaaccgtttcatcattgctgacgcgagtaaatgtattggttgccgtaaacacttcttgcggcgatggttcctggctcttcgatcaaaacgccgccgtacggcgctgatgttccccggatcctacggtcattcagc

SEQ ID NO: 2767 - DNA, 158 bp, synthetic construct
  misc_feature 1..158: note = Synthetic nucleic acid
  source 1..158: mol_type = other DNA
cagacgacggccagtgtcgacatggcaggaaaaacgatgataccgttactcgcctttgccaacacttcttgcggcgatggttcctggctcttcgatcctgattttgtggtggagtggatgcaaaagcagaacggattaggatcctacggtcattcagc

SEQ ID NO: 2768 - DNA, 158 bp, synthetic construct
  misc_feature 1..158: note = Synthetic nucleic acid
  source 1..158: mol_type = other DNA
cagacgacggccagtgtcgacgtgaaaaccgccctgctgctggaaaaactggaaggacaaacacttcttgcggcgatggttcctggctcttcgatcctggaaaaaatcgaaaacaggttagcgcgtttaacccgcctaggatcctacggtcattcagc

SEQ ID NO: 2769 - DNA, 158 bp, synthetic construct
  misc_feature 1..158: note = Synthetic nucleic acid
  source 1..158: mol_type = other DNA
cagacgacggccagtgtcgacttgagcacgactaaccatgatcaccacatttacgtcttgatgaacacttcttgcggcgatggttcctggctcttcgatctggcaagcaccattgaggttattaaaaaaggcaaaccgggatcctacggtcattcagc

SEQ ID NO: 2770 - DNA, 158 bp, synthetic construct
  misc_feature 1..158: note = Synthetic nucleic acid
  source 1..158: mol_type = other DNA
cagacgacggccagtgtcgacatgacacaacctctttttctgatcgggcctcggggctgtaacacttcttgcggcgatggttcctggctcttcgatcctgaaattcgcagcgccctggcacagacgatcaattgtgtgggatcctacggtcattcagc

SEQ ID NO: 2771 - DNA, 158 bp, synthetic construct
  misc_feature 1..158: note = Synthetic nucleic acid
  source 1..158: mol_type = other DNA
cagacgacggccagtgtcgacatggctttgacaaccatttcgccgcatgatgcacaagaattaataacacttcttgcggcgatggttcctggctcttcgatcttgttagataagatgccgtggaaccaacgagcttccggatcctacggtcattcagc

SEQ ID NO: 2772 - DNA, 158 bp, synthetic construct
  misc_feature 1..158: note = Synthetic nucleic acid
  source 1..158: mol_type = other DNA
cagacgacggccagtgtcgacgtgttggataaactgcgttcccgtattgtgcatttggggcaacacttcttgcggcgatggttcctggctcttcgatcgcctgaaaccaaacagacatcggtaggtgaaccatgctggggatcctacggtcattcagc

SEQ ID NO: 2773 - DNA, 158 bp, synthetic construct
  misc_feature 1..158: note = Synthetic nucleic acid
  source 1..158: mol_type = other DNA
cagacgacggccagtgtcgacatgaaacgttttagtctggctattctggcgctggttgttgcaaaacacttcttgcggcgatggttcctggctcttcgatctggcggtgaacgctatgcctgtggtgtaattaagtcaggatcctacggtcattcagc

SEQ ID NO: 2774 - DNA, 158 bp, synthetic construct
  misc_feature 1..158: note = Synthetic nucleic acid
  source 1..158: mol_type = other DNA
cagacgacggccagtgtcgacatgaatatgggtcttttttacggttccagcacctgttacaccgaaataacacttcttgcggcgatggttcctggctcttcgatcatcctcaacgaaatggcagagcattacgccgtaggatcctacggtcattcagc

SEQ ID NO: 2775 - DNA, 158 bp, synthetic construct
  misc_feature 1..158: note = Synthetic nucleic acid
  source 1..158: mol_type = other DNA
cagacgacggccagtgtcgacatgcaaaaggtaaaattacccctgactctcgatccggttcaacacttcttgcggcgatggttcctggctcttcgatcaaacccatttgccgtattagccagcttaaagcgtaagatcggatcctacggtcattcagc

SEQ ID NO: 2776 - DNA, 158 bp, synthetic construct
  misc_feature 1..158: note = Synthetic nucleic acid
  source 1..158: mol_type = other DNA
cagacgacggccagtgtcgacatgcaactgaacaaagtgctgaaagggctgatgattgctctaacacttcttgcggcgatggttcctggctcttcgatcgcatactccaaaaaccgtcgtgcggtactggtttaccgtggatcctacggtcattcagc

SEQ ID NO: 2777 - DNA, 158 bp, synthetic construct
  misc_feature 1..158: note = Synthetic nucleic acid
  source 1..158: mol_type = other DNA
cagacgacggccagtgtcgacatgccaaccgttattacgcacgccgccgttcccctatgaacacttcttgcggcgatggttcctggctcttcgatcgggatgctactgatgggaatgttgtggtggcgcagacgactaggatcctacggtcattcagc

SEQ ID NO: 2778 - DNA, 158 bp, synthetic construct
  misc_feature 1..158: note = Synthetic nucleic acid
  source 1..158: mol_type = other DNA
cagacgacggccagtgtcgacatggcagagaaacgcaatatctttctggttgggcctataacacttcttgcggcgatggttcctggctcttcgatcgtggttgcaaaccagattattcacatgctggaaagcaaccatggatcctacggtcattcagc

SEQ ID NO: 2779 - DNA, 158 bp, synthetic construct
  misc_feature 1..158: note = Synthetic nucleic acid
  source 1..158: mol_type = other DNA
cagacgacggccagtgtcgacatggctattattctcggcattgatccgggttcgcgcgtgaccggctaaacacttcttgcggcgatggttcctggctcttcgatccggctgaacctggcgagagggcgactgcgtcctggatcctacggtcattcagc

SEQ ID NO: 2780 - DNA, 158 bp, synthetic construct
  misc_feature 1..158: note = Synthetic nucleic acid
  source 1..158: mol_type = other DNA
cagacgacggccagtgtcgacatgtcaaagccaaaatacccttttgaaaagcgccttgaagtaacacttcttgcggcgatggttcctggctcttcgatcaaaaagctgaaagccttagctcatcccacgaaaaagcatggatcctacggtcattcagc

SEQ ID NO: 2781 - DNA, 158 bp, synthetic construct
  misc_feature 1..158: note = Synthetic nucleic acid
  source 1..158: mol_type = other DNA
cagacgacggccagtgtcgacatgtctgaccgcgccactaccacagcttccttaacgttcgaaacacttcttgcggcgatggttcctggctcttcgatcgagcactgcctgctgttccgtctggagtatgggttagtgggatcctacggtcattcagc

SEQ ID NO: 2782 - DNA, 158 bp, synthetic construct
  misc_feature 1..158: note = Synthetic nucleic acid
  source 1..158: mol_type = other DNA
cagacgacggccagtgtcgacatgaccattttgccacgccataaagatgtcgcgaaaagtcgaacacttcttgcggcgatggttcctggctcttcgatctttatcggtcatcactggccgctgggtattctgtcgccgggatcctacggtcattcagc

SEQ ID NO: 2783 - DNA, 158 bp, synthetic construct
  misc_feature 1..158: note = Synthetic nucleic acid
  source 1..158: mol_type = other DNA
cagacgacggccagtgtcgacatgagtgcgcaagtttcactagagttacatcaccgcattagaacacttcttgcggcgatggttcctggctcttcgatcgcggtaatcacttcccataacctgagtgtactgttcataggatcctacggtcattcagc

SEQ ID NO: 2784 - DNA, 158 bp, synthetic construct
  misc_feature 1..158: note = Synthetic nucleic acid
  source 1..158: mol_type = other DNA
cagacgacggccagtgtcgacatgcgtttttctcaccgactgttcttacttctgattctcctgctaacacttcttgcggcgatggttcctggctcttcgatcgtcttaatgctcgcacggaagaaaaatgatggaagaggatcctacggtcattcagc

SEQ ID NO: 2785 - DNA, 158 bp, synthetic construct
  misc_feature 1..158: note = Synthetic nucleic acid
  source 1..158: mol_type = other DNA
cagacgacggccagtgtcgacatggtagataaacgcgaatcctatacaaaagaagaccttcttgcctctaacacttcttgcggcgatggttcctggctcttcgatctcggtctgttccaggatacgtctgccttcgggggatcctacggtcattcagc

SEQ ID NO: 2786 - DNA, 158 bp, synthetic construct
  misc_feature 1..158: note = Synthetic nucleic acid
  source 1..158: mol_type = other DNA
cagacgacggccagtgtcgacatgtccatccgttttgcccgcaaagccgactgtgctgccattaacacttcttgcggcgatggttcctggctcttcgatcaactcgacgagcgcactgaaccggacgcgattggatatggatcctacggtcattcagc

SEQ ID NO: 2787 - DNA, 158 bp, synthetic construct
  misc_feature 1..158: note = Synthetic nucleic acid
  source 1..158: mol_type = other DNA
cagacgacggccagtgtcgacgtgatgaaatttaaaaaatgtcttctgcctgtggcaatgttagcgtcattaacacttcttgcggcgatggttcctggctcttcgatcccaaataccaaatgtcctgaaaagagccacggatcctacggtcattcagc

SEQ ID NO: 2788 - DNA, 158 bp, synthetic construct
  misc_feature 1..158: note = Synthetic nucleic acid
  source 1..158: mol_type = other DNA
cagacgacggccagtgtcgacatgaaaaaaattgcatgtctttcagcactggccgcagttctggctttaacacttcttgcggcgatggttcctggctcttcgatcacctggattgccggtgttggttaccgcttcaaaggatcctacggtcattcagc

SEQ ID NO: 2789 - DNA, 158 bp, synthetic construct
  misc_feature 1..158: note = Synthetic nucleic acid
  source 1..158: mol_type = other DNA
cagacgacggccagtgtcgacatgagaagagtactctttagctgtttctgcgggctactgtaacacttcttgcggcgatggttcctggctcttcgatcggcgaaagcggatgcgatatttatgatcaattataatgttggatcctacggtcattcagc

SEQ ID NO: 2790 - DNA, 158 bp, synthetic construct
  misc_feature 1..158: note = Synthetic nucleic acid
  source 1..158: mol_type = other DNA
cagacgacggccagtgtcgacatgccgttgttagatagcttcacagtcgatcatacccggatgaacacttcttgcggcgatggttcctggctcttcgatccactgccgaaagagaagttgcaggaactgcacatcgggggatcctacggtcattcagc

SEQ ID NO: 2791 - DNA, 158 bp, synthetic construct
  misc_feature 1..158: note = Synthetic nucleic acid
  source 1..158: mol_type = other DNA
cagacgacggccagtgtcgacatgcgctacagcaaattgacaatgcttatcccctgcgcactgctaacacttcttgcggcgatggttcctggctcttcgatcgcgggtacgctccgtcagtccatcgagaatcgcgtaggatcctacggtcattcagc

SEQ ID NO: 2792 - DNA, 158 bp, synthetic construct
  misc_feature 1..158: note = Synthetic nucleic acid
  source 1..158: mol_type = other DNA
cagacgacggccagtgtcgacatgctgagattacttgaagaaaaaattgccacgccactggaacacttcttgcggcgatggttcctggctcttcgatcagagtggttattgcgccatgaaggttatcttttgctgagcggatcctacggtcattcagc

SEQ ID NO: 2793 - DNA, 158 bp, synthetic construct
  misc_feature 1..158: note = Synthetic nucleic acid
  source 1..158: mol_type = other DNA
cagacgacggccagtgtcgacatggaaaagaccacaacgcaggagttattagcgcaggctaacacttcttgcggcgatggttcctggctcttcgatcagcatgatcactctgtgcaggtgaaaaagaaaccgcgtgacggatcctacggtcattcagc

SEQ ID NO: 2794 - DNA, 158 bp, synthetic construct
  misc_feature 1..158: note = Synthetic nucleic acid
  source 1..158: mol_type = other DNA
cagacgacggccagtgtcgacatggattacttcaccctctttggcttgcctgcccgaacacttcttgcggcgatggttcctggctcttcgatccgaagcagtgccgaacaactcgaagaaaaactgctcgattttataggatcctacggtcattcagc

SEQ ID NO: 2795 - DNA, 158 bp, synthetic construct
  misc_feature 1..158: note = Synthetic nucleic acid
  source 1..158: mol_type = other DNA
cagacgacggccagtgtcgacatgttgaaacggataatctggattctgttcttattgggattaacgtgggaacacttcttgcggcgatggttcctggctcttcgatccagcgcgacatttgtacttcattatgacaggggatcctacggtcattcagc

SEQ ID NO: 2796 - DNA, 158 bp, synthetic construct
  misc_feature 1..158: note = Synthetic nucleic acid
  source 1..158: mol_type = other DNA
cagacgacggccagtgtcgacgtgtttgatatcggttttagcgaactgctattggtgttcatcatcgaacacttcttgcggcgatggttcctggctcttcgatctgcaccttccccttcgtcgagtgataaaccgggcggatcctacggtcattcagc

SEQ ID NO: 2797 - DNA, 158 bp, synthetic construct
  misc_feature 1..158: note = Synthetic nucleic acid
  source 1..158: mol_type = other DNA
cagacgacggccagtgtcgacatgacggggggagttatgagtcaaaagtttgtagtgggcaacacttcttgcggcgatggttcctggctcttcgatcagtttaacgccagtttgaccatggtggtggactatcaagtgggatcctacggtcattcagc

SEQ ID NO: 2798 - DNA, 158 bp, synthetic construct
  misc_feature 1..158: note = Synthetic nucleic acid
  source 1..158: mol_type = other DNA
cagacgacggccagtgtcgacatgagtcaggtaagcactgaatttatcccgacccgtattgctattaacacttcttgcggcgatggttcctggctcttcgatcgtccgtgtaatttccatccacatttgaagaaagccggatcctacggtcattcagc

SEQ ID NO: 2799 - DNA, 158 bp, synthetic construct
  misc_feature 1..158: note = Synthetic nucleic acid
  source 1..158: mol_type = other DNA
cagacgacggccagtgtcgacatgcaccaagttgtctgtgcgaccaccaatcccgctaaaattaacacttcttgcggcgatggttcctggctcttcgatctcctggcgctgagtccgtttcataatgccgtgtatgagggatcctacggtcattcagc

SEQ ID NO: 2800 - DNA, 158 bp, synthetic construct
  misc_feature 1..158: note = Synthetic nucleic acid
  source 1..158: mol_type = other DNA
cagacgacggccagtgtcgacgtgagtggaatactgacgcgctggcgacagtttggtaaacgctacttctaacacttcttgcggcgatggttcctggctcttcgatccatccgtgctggccctcaacgcctcacctcgggatcctacggtcattcagc

SEQ ID NO: 2801 - DNA, 158 bp, synthetic construct
  misc_feature 1..158: note = Synthetic nucleic acid
  source 1..158: mol_type = other DNA
cagacgacggccagtgtcgacatgaaaccatcatcttcaaactcacgcagcaaaggtcatgcaaaagcaacacttcttgcggcgatggttcctggctcttcgatcgaagacatgatgcgtctgctgcggggcaacaggggatcctacggtcattcagc

SEQ ID NO: 2802 - DNA, 158 bp, synthetic construct
  misc_feature 1..158: note = Synthetic nucleic acid
  source 1..158: mol_type = other DNA
cagacgacggccagtgtcgacatgaatcagcaacgcgggtttaccctgctggagatgatgctggtaacacttcttgcggcgatggttcctggctcttcgatcctggatcaaacgctcgccagagatacccgcccatgtggatcctacggtcattcagc

SEQ ID NO: 2803 - DNA, 158 bp, synthetic construct
  misc_feature 1..158: note = Synthetic nucleic acid
  source 1..158: mol_type = other DNA
cagacgacggccagtgtcgacatgaatctacaacgatttgatgacagcaccctaatccgtatctttgcaacacttcttgcggcgatggttcctggctcttcgatcgtgattaacttgcgccattcaggagttttaaggggatcctacggtcattcagc

SEQ ID NO: 2804 - DNA, 158 bp, synthetic construct
  misc_feature 1..158: note = Synthetic nucleic acid
  source 1..158: mol_type = other DNA
cagacgacggccagtgtcgacatggcgacgctgacagaagatgatgtgcttgagcaactgaacacttcttgcggcgatggttcctggctcttcgatccgctggcagtaacgaccaccttaaaggaattaacgccggatggatcctacggtcattcagc

SEQ ID NO: 2805 - DNA, 158 bp, synthetic construct
  misc_feature 1..158: note = Synthetic nucleic acid
  source 1..158: mol_type = other DNA
cagacgacggccagtgtcgacatgggtttgttcgataaactgaaatctctggtttccgacgacaaaacacttcttgcggcgatggttcctggctcttcgatcgtgggtgaaaccccggttatccgcatcaagaagatgggatcctacggtcattcagc

SEQ ID NO: 2806 - DNA, 158 bp, synthetic construct
  misc_feature 1..158: note = Synthetic nucleic acid
  source 1..158: mol_type = other DNA
cagacgacggccagtgtcgacatgtacacttcaggctatgcacatcgttcttcgtcgttaacacttcttgcggcgatggttcctggctcttcgatccaactttccgggctaaaaattcactctaatttgtatcatcctggatcctacggtcattcagc

SEQ ID NO: 2807 - DNA, 158 bp, synthetic construct
  misc_feature 1..158: note = Synthetic nucleic acid
  source 1..158: mol_type = other DNA
cagacgacggccagtgtcgacatgtcagttttgcaagtgttacatattccggacgagcggcttaacacttcttgcggcgatggttcctggctcttcgatcaagttgaaaaactggatcgtctgaaagcccgggctcgaggatcctacggtcattcagc

SEQ ID NO: 2808 - DNA, 158 bp, synthetic construct
  misc_feature 1..158: note = Synthetic nucleic acid
  source 1..158: mol_type = other DNA
cagacgacggccagtgtcgacatgtcttcccgcaataatccggcgcgtgtcgccatcgtgatggggtaacacttcttgcggcgatggttcctggctcttcgatcgctggaaaacccggacccgcgaggtgcggcaacaggatcctacggtcattcagc

SEQ ID NO: 2809 - DNA, 158 bp, synthetic construct
  misc_feature 1..158: note = Synthetic nucleic acid
  source 1..158: mol_type = other DNA
cagacgacggccagtgtcgacatgaatcgtattgaacattatcatgactggttacgtgacgcccaaacacttcttgcggcgatggttcctggctcttcgatccgctctgaaactgatggcgtagaagcgaagaaaagaggatcctacggtcattcagc

SEQ ID NO: 2810 - DNA, 158 bp, synthetic construct
  misc_feature 1..158: note = Synthetic nucleic acid
  source 1..158: mol_type = other DNA
cagacgacggccagtgtcgacatggttgaggatattttggctccagggttacgggtcgtgttttgcggtataacacttcttgcggcgatggttcctggctcttcgatcgaccaggcgctggtagtgcgtgggcgagttggatcctacggtcattcagc

SEQ ID NO: 2811 - DNA, 158 bp, synthetic construct
  misc_feature 1..158: note = Synthetic nucleic acid
  source 1..158: mol_type = other DNA
cagacgacggccagtgtcgacatgtcacaaaccgttcatttccagggcaacccggttacagtaacacttcttgcggcgatggttcctggctcttcgatcccggattacgaagcagctctggctgtactgaaagcaaacggatcctacggtcattcagc

SEQ ID NO: 2812 - DNA, 158 bp, synthetic construct
  misc_feature 1..158: note = Synthetic nucleic acid
  source 1..158: mol_type = other DNA
cagacgacggccagtgtcgacatgaaaagacttcacaagaggttcctgttagctacgttttgcgaacacttcttgcggcgatggttcctggctcttcgatccgaggcgctaatcaatgtgatctacacctggcaattaggatcctacggtcattcagc

SEQ ID NO: 2813 - DNA, 158 bp, synthetic construct
  misc_feature 1..158: note = Synthetic nucleic acid
  source 1..158: mol_type = other DNA
cagacgacggccagtgtcgacatgaaatggtgcaaacgtgggtatgtattggcggcaatattaacacttcttgcggcgatggttcctggctcttcgatcattcaggcagtgattagcatcacctatacctacagctctggatcctacggtcattcagc

SEQ ID NO: 2814 - DNA, 158 bp, synthetic construct
  misc_feature 1..158: note = Synthetic nucleic acid
  source 1..158: mol_type = other DNA
cagacgacggccagtgtcgacatgaataacattgcgccgcaatcacctgtaatgcgtcgcctaacacttcttgcggcgatggttcctggctcttcgatccatgtcgattgtgaagtgcggatgttgcgcgaactcagaggatcctacggtcattcagc

SEQ ID NO: 2815 - DNA, 158 bp, synthetic construct
  misc_feature 1..158: note = Synthetic nucleic acid
  source 1..158: mol_type = other DNA
cagacgacggccagtgtcgacatgaccggtatgacgaatgtaacaaagctggccagcgagccgtaacacttcttgcggcgatggttcctggctcttcgatcggcgctgttagatagcgcggcgtcagaagtggcgagaggatcctacggtcattcagc

SEQ ID NO: 2816 - DNA, 158 bp, synthetic construct
  misc_feature 1..158: note = Synthetic nucleic acid
  source 1..158: mol_type = other DNA
cagacgacggccagtgtcgacatgactgaaatggctaaaggaagcgtgacgcatcagcggttaataacacttcttgcggcgatggttcctggctcttcgatccaaccagaactggtcaatttccgccgcactgcgtcgggatcctacggtcattcagc

SEQ ID NO: 2817 - DNA, 158 bp, synthetic construct
  misc_feature 1..158: note = Synthetic nucleic acid
  source 1..158: mol_type = other DNA
cagacgacggccagtgtcgacatgagcaatcttacttatcttcagggttatcccgagcagctactttaacacttcttgcggcgatggttcctggctcttcgatcaacgcagttgtcgcttgggcagaacaaaatccagggatcctacggtcattcagc

SEQ ID NO: 2818 - DNA, 158 bp, synthetic construct
  misc_feature 1..158: note = Synthetic nucleic acid
  source 1..158: mol_type = other DNA
cagacgacggccagtgtcgacatgccgggcaacagcccgcattatgggcgttgaacacttcttgcggcgatggttcctggctcttcgatccatgacaaagtcatcgggcattatctgaacataaaacactatcaaccaggatcctacggtcattcagc

SEQ ID NO: 2819 - DNA, 158 bp, synthetic construct
  misc_feature 1..158: note = Synthetic nucleic acid
  source 1..158: mol_type = other DNA
cagacgacggccagtgtcgacatgccgggcaacagcccgcattatgggcgttgaacacttcttgcggcgatggttcctggctcttcgatccatgacaaagtcatcgggcattatctgaacataaaacactatcaaagtggatcctacggtcattcagc

SEQ ID NO: 2820 - DNA, 158 bp, synthetic construct
  misc_feature 1..158: note = Synthetic nucleic acid
  source 1..158: mol_type = other DNA
cagacgacggccagtgtcgacatgccgggcaacagcccgcattatgggcgttgaacacttcttgcggcgatggttcctggctcttcgatccatgacaaagtcatcgggcattatctgaacataaaacactatcaagtcggatcctacggtcattcagc

SEQ ID NO: 2821 - DNA, 158 bp, synthetic construct
  misc_feature 1..158: note = Synthetic nucleic acid
  source 1..158: mol_type = other DNA
cagacgacggccagtgtcgacatgccgggcaacagcccgcattatgggcgttgaacacttcttgcggcgatggttcctggctcttcgatccatgacaaagtcatcgggcattatctgaacataaaacactatcaattcggatcctacggtcattcagc

SEQ ID NO: 2822 - DNA, 158 bp, synthetic construct
  misc_feature 1..158: note = Synthetic nucleic acid
  source 1..158: mol_type = other DNA
cagacgacggccagtgtcgacatgccgggcaaccgcccgcattatgggcgttgaacacttcttgcggcgatggttcctggctcttcgatccatgacaaagtcatcgggcattatctgaacataaaacactatcaaactggatcctacggtcattcagc

SEQ ID NO: 2823 - DNA, 158 bp, synthetic construct
  misc_feature 1..158: note = Synthetic nucleic acid
  source 1..158: mol_type = other DNA
cagacgacggccagtgtcgacatgccgggcaaccgcccgcattatgggcgttgaacacttcttgcggcgatggttcctggctcttcgatccatgacaaagtcatcgggcattatctgaacataaaacactatcaaggaggatcctacggtcattcagc

SEQ ID NO: 2824 - DNA, 158 bp, synthetic construct
  misc_feature 1..158: note = Synthetic nucleic acid
  source 1..158: mol_type = other DNA
cagacgacggccagtgtcgacatgctaattcgagtagaaattcccattgatgcgccgggtattaacacttcttgcggcgatggttcctggctcttcgatcgcctggttgagtatcacgagcatttcaatcgctttgatggatcctacggtcattcagc

SEQ ID NO: 2825 - DNA, 158 bp, synthetic construct
  misc_feature 1..158: note = Synthetic nucleic acid
  source 1..158: mol_type = other DNA
cagacgacggccagtgtcgacatggcaaccgctggaatgcttctcaaactcaactctcaaataacacttcttgcggcgatggttcctggctcttcgatccaacatgttctgaatgtcgtgtcacaccagctgcatgtgggatcctacggtcattcagc

SEQ ID NO: 2826 - DNA, 158 bp, synthetic construct
  misc_feature 1..158: note = Synthetic nucleic acid
  source 1..158: mol_type = other DNA
cagacgacggccagtgtcgacatggctcacatcgaaaaacaagctggcgaactgcagaacacttcttgcggcgatggttcctggctcttcgatcctgccaagcgtggtaaatccgttgaagaaattctggggaaagtaggatcctacggtcattcagc

SEQ ID NO: 2827 - DNA, 158 bp, synthetic construct
  misc_feature 1..158: note = Synthetic nucleic acid
  source 1..158: mol_type = other DNA
cagacgacggccagtgtcgacatgggaatgattggctattttgcagaaattgactcagaaaagattaaccaactaacacttcttgcggcgatggttcctggctcttcgatccatgcgctgacggttattgttgggagtggatcctacggtcattcagc

SEQ ID NO: 2828 - DNA, 158 bp, synthetic construct
  misc_feature 1..158: note = Synthetic nucleic acid
  source 1..158: mol_type = other DNA
cagacgacggccagtgtcgacttgtctgaagtcgaatttagccacgaatactggatgcgtcaaacacttcttgcggcgatggttcctggctcttcgatcattaaagcgcagaaaaaagcgcaatcctcgacggatctgggatcctacggtcattcagc

SEQ ID NO: 2829 - DNA, 158 bp, synthetic construct
  misc_feature 1..158: note = Synthetic nucleic acid
  source 1..158: mol_type = other DNA
cagacgacggccagtgtcgacatgacagaatcaacatcccgtcgcccggcatatgaacacttcttgcggcgatggttcctggctcttcgatctctgatggaagatatccaggagatttggcgaaattttgccgacatcggatcctacggtcattcagc

SEQ ID NO: 2830 - DNA, 158 bp, synthetic construct
  misc_feature 1..158: note = Synthetic nucleic acid
  source 1..158: mol_type = other DNA
cagacgacggccagtgtcgacatgatcaatgcactgggattgctggaagtggacggcataacacttcttgcggcgatggttcctggctcttcgatcttacgtaaacgcagtagtcgttatcgtctcaagccccatgcaggatcctacggtcattcagc

SEQ ID NO: 2831 - DNA, 158 bp, synthetic construct
  misc_feature 1..158: note = Synthetic nucleic acid
  source 1..158: mol_type = other DNA
cagacgacggccagtgtcgacatgcacgagaatcaacaaccacaaaccgaggcttttgagctaacacttcttgcggcgatggttcctggctcttcgatcccggaagcgatccctgaactgctggagcggtataaagtgggatcctacggtcattcagc

SEQ ID NO: 2832 - DNA, 158 bp, synthetic construct
  misc_feature 1..158: note = Synthetic nucleic acid
  source 1..158: mol_type = other DNA
cagacgacggccagtgtcgacatgcgcatagttaccgctgccgtcatggcctcaaaacacttcttgcggcgatggttcctggctcttcgatcttcatcgttgaagctattgagtagtagcaactcacgttcccagcttggatcctacggtcattcagc

SEQ ID NO: 2833 - DNA, 158 bp, synthetic construct
  misc_feature 1..158: note = Synthetic nucleic acid
  source 1..158: mol_type = other DNA
cagacgacggccagtgtcgacatgaaaacatcccgtctccctatcgccatccaacaggccgttataacacttcttgcggcgatggttcctggctcttcgatctgtgttcactgcggtgaacagctggttgcgaaatgtggatcctacggtcattcagc

SEQ ID NO: 2834 - DNA, 158 bp, synthetic construct
  misc_feature 1..158: note = Synthetic nucleic acid
  source 1..158: mol_type = other DNA
cagacgacggccagtgtcgacatgaacggactcacggcaacgggtgtcaccgtcaacacttcttgcggcgatggttcctggctcttcgatcgtggacaaaaattaagcgaagcgacgactaaacgcgacgggtatcttggatcctacggtcattcagc

SEQ ID NO: 2835 - DNA, 158 bp, synthetic construct
  misc_feature 1..158: note = Synthetic nucleic acid
  source 1..158: mol_type = other DNA
cagacgacggccagtgtcgacatgacaggaagtcaggtcattgatgctgaagaggacaggcataaaaacacttcttgcggcgatggttcctggctcttcgatcgttctcccatggagctgatgacgatgctgcggtttggatcctacggtcattcagc

SEQ ID NO: 2836 - DNA, 158 bp, synthetic construct
  misc_feature 1..158: note = Synthetic nucleic acid
  source 1..158: mol_type = other DNA
cagacgacggccagtgtcgacatgactgacagtgaactgatgcagttaagtgaacaggttggaacacttcttgcggcgatggttcctggctcttcgatcttgcagaccttgtggcaacaatttctacaaaacactatcggatcctacggtcattcagc

SEQ ID NO: 2837 - DNA, 158 bp, synthetic construct
  misc_feature 1..158: note = Synthetic nucleic acid
  source 1..158: mol_type = other DNA
cagacgacggccagtgtcgacatgcaacgtctggccaccattgcaccgccacaaacacttcttgcggcgatggttcctggctcttcgatccgctgcgatagttgccgcgaacctttcgattatttcaaatgtattaacggatcctacggtcattcagc

SEQ ID NO: 2838 - DNA, 158 bp, synthetic construct
  misc_feature 1..158: note = Synthetic nucleic acid
  source 1..158: mol_type = other DNA
cagacgacggccagtgtcgacatgcctccatcattacgaaaagccgttgctgctgctattgaacacttcttgcggcgatggttcctggctcttcgatctgagattgagcgtgaagtctgtttgtgggggcaacaggcaggatcctacggtcattcagc

SEQ ID NO: 2839 - DNA, 158 bp, synthetic construct
  misc_feature 1..158: note = Synthetic nucleic acid
  source 1..158: mol_type = other DNA
cagacgacggccagtgtcgacatgctgaaaccagaaatgattgaaaaacttaatgagcagatgaacctggaaaacacttcttgcggcgatggttcctggctcttcgatcaactctctaccctcgacacacaaaacaagggatcctacggtcattcagc

SEQ ID NO: 2840 - DNA, 158 bp, synthetic construct
  misc_feature 1..158: note = Synthetic nucleic acid
  source 1..158: mol_type = other DNA
cagacgacggccagtgtcgacatggctttaaatcttcaagacaaacaagcgattgttgctgaagtcagcaacacttcttgcggcgatggttcctggctcttcgatcctgctgtacgcgatgcgaaagaagctgctggtggatcctacggtcattcagc

SEQ ID NO: 2841 - DNA, 158 bp, synthetic construct
  misc_feature 1..158: note = Synthetic nucleic acid
  source 1..158: mol_type = other DNA
cagacgacggccagtgtcgacatgtcacaccccgcgttaacgcaactgcgtgcgaacacttcttgcggcgatggttcctggctcttcgatccgctgttgctaacagaactgtttttaccggcgtcaccgttgtacctcggatcctacggtcattcagc

SEQ ID NO: 2842 - DNA, 158 bp, synthetic construct
  misc_feature 1..158: note = Synthetic nucleic acid
  source 1..158: mol_type = other DNA
cagacgacggccagtgtcgacatgtctgaatatcgtcgttattacatcaaggggggaacatggtttttaacacttcttgcggcgatggttcctggctcttcgatcgattttagtgccggggagcgtatcatttcatggggatcctacggtcattcagc

SEQ ID NO: 2843 - DNA, 158 bp, synthetic construct
  misc_feature 1..158: note = Synthetic nucleic acid
  source 1..158: mol_type = other DNA
cagacgacggccagtgtcgacatgaacattgtcgatcaacaaacttttcgcgatgcgatgtcctgcataacacttcttgcggcgatggttcctggctcttcgatcagttatcacgcgctgatgcgccctgcttgttccggatcctacggtcattcagc

SEQ ID NO: 2844 - DNA, 158 bp, synthetic construct
  misc_feature 1..158: note = Synthetic nucleic acid
  source 1..158: mol_type = other DNA
cagacgacggccagtgtcgacatgaagaccaacaggagtctggtcgtcatagtgtcactaattaccaacacttcttgcggcgatggttcctggctcttcgatcgccagcaagaattgaaagcgataaatacacatcttggatcctacggtcattcagc

SEQ ID NO: 2845 - DNA, 158 bp, synthetic construct
  misc_feature 1..158: note = Synthetic nucleic acid
  source 1..158: mol_type = other DNA
cagacgacggccagtgtcgacatgagtcaatcgatctgttcaacagggctacgctggaacacttcttgcggcgatggttcctggctcttcgatcttgtgctggaaggttttttgccttctagagcgaaaaaacaaaccggatcctacggtcattcagc

SEQ ID NO: 2846 - DNA, 158 bp, synthetic construct
  misc_feature 1..158: note = Synthetic nucleic acid
  source 1..158: mol_type = other DNA
cagacgacggccagtgtcgacatgatgaaaactgttaaacatcttctgtgctgtgccattgccaacacttcttgcggcgatggttcctggctcttcgatcatctggtgttaaaacaggggctgaacttcatttcccgtggatcctacggtcattcagc

SEQ ID NO: 2847 - DNA, 158 bp, synthetic construct
  misc_feature 1..158: note = Synthetic nucleic acid
  source 1..158: mol_type = other DNA
cagacgacggccagtgtcgacatgcgtattttagtcttaggggtcggcaatattttgctgaccgatgaaaacacttcttgcggcgatggttcctggctcttcgatcaagccatcccacgggaggcgattcatgacgctggatcctacggtcattcagc

SEQ ID NO: 2848 - DNA, 158 bp, synthetic construct
  misc_feature 1..158: note = Synthetic nucleic acid
  source 1..158: mol_type = other DNA
cagacgacggccagtgtcgacatggaaatgaccaacgcgcaacgtcttattttgtctaatcagtacaaaacacttcttgcggcgatggttcctggctcttcgatcgccaacgaaattaatcaaattatcaatgcccgtggatcctacggtcattcagc

SEQ ID NO: 2849 - DNA, 158 bp, synthetic construct
  misc_feature 1..158: note = Synthetic nucleic acid
  source 1..158: mol_type = other DNA
cagacgacggccagtgtcgacatggaacgttttcttgaaaatgcaatgtatgcttctcgctggaacacttcttgcggcgatggttcctggctcttcgatctgggctatcttgaccgactgactcgtcataatcaccagggatcctacggtcattcagc

SEQ ID NO: 2850 - DNA, 158 bp, synthetic construct
  misc_feature 1..158: note = Synthetic nucleic acid
  source 1..158: mol_type = other DNA
cagacgacggccagtgtcgacatggtagatagcaagaagcgccctggcaaagatctaacacttcttgcggcgatggttcctggctcttcgatcgaagaagtcaagcagagtaatcgtctggttattaagacgcgctggggatcctacggtcattcagc

SEQ ID NO: 2851 - DNA, 158 bp, synthetic construct
  misc_feature 1..158: note = Synthetic nucleic acid
  source 1..158: mol_type = other DNA
cagacgacggccagtgtcgacatggttactttccacaccaatcacggcgatattgtcatcaaaaaacacttcttgcggcgatggttcctggctcttcgatcagacgttatcattgaaagcgtgaccgttagcgaggttggatcctacggtcattcagc

SEQ ID NO: 2852 - DNA, 158 bp, synthetic construct
  misc_feature 1..158: note = Synthetic nucleic acid
  source 1..158: mol_type = other DNA
cagacgacggccagtgtcgacgtgaagattgatgcatcccgtcggggcatactcactggtaacacttcttgcggcgatggttcctggctcttcgatccggtatcagccataactgcggagtatctccatgcacacactggatcctacggtcattcagc

SEQ ID NO: 2853 - DNA, 158 bp, synthetic construct
  misc_feature 1..158: note = Synthetic nucleic acid
  source 1..158: mol_type = other DNA
cagacgacggccagtgtcgacgtgagcatgagtcttttgaatgacgttcagaaattcattgaagcccataacacttcttgcggcgatggttcctggctcttcgatcggtatctctcagggaattacgtgggggcttcgggatcctacggtcattcagc

SEQ ID NO: 2854 - DNA, 158 bp, synthetic construct
  misc_feature 1..158: note = Synthetic nucleic acid
  source 1..158: mol_type = other DNA
cagacgacggccagtgtcgacatgaacatacttctctctattgcaatcacaacaggcattctctccgaacacttcttgcggcgatggttcctggctcttcgatcgcaccgtgagcaggaaatcaaaaataaagcgctaggatcctacggtcattcagc

SEQ ID NO: 2855 - DNA, 158 bp, synthetic construct
  misc_feature 1..158: note = Synthetic nucleic acid
  source 1..158: mol_type = other DNA
cagacgacggccagtgtcgacatgccatctttcgatattgtctctgaagttgatcttcaggaagcaaacacttcttgcggcgatggttcctggctcttcgatcgtcagccgttccagttcaaaaacttccgcgataatggatcctacggtcattcagc

SEQ ID NO: 2856 - DNA, 158 bp, synthetic construct
  misc_feature 1..158: note = Synthetic nucleic acid
  source 1..158: mol_type = other DNA
cagacgacggccagtgtcgacatgcgccggatattatcagtcttactcgaaaatgaatcaggcgcaacacttcttgcggcgatggttcctggctcttcgatcgtcggactttcgcgcggcgataaaataatgcgtgccggatcctacggtcattcagc

SEQ ID NO: 2857 - DNA, 158 bp, synthetic construct
  misc_feature 1..158: note = Synthetic nucleic acid
  source 1..158: mol_type = other DNA
cagacgacggccagtgtcgacatgaaatcgttaattatcgttaatccggctgactgtattggctgccaacacttcttgcggcgatggttcctggctcttcgatcgcgtattgttgccagcggtgagaatcctctctcaggatcctacggtcattcagc

SEQ ID NO: 2858 - DNA, 158 bp, synthetic construct
  misc_feature 1..158: note = Synthetic nucleic acid
  source 1..158: mol_type = other DNA
cagacgacggccagtgtcgacatgaagaccattctacctgcagtattgtttgccgctttcgctaaacacttcttgcggcgatggttcctggctcttcgatcggcggaagagaaaattgacaacgcggtagttcgcagaggatcctacggtcattcagc

SEQ ID NO: 2859 - DNA, 158 bp, synthetic construct
  misc_feature 1..158: note = Synthetic nucleic acid
  source 1..158: mol_type = other DNA
cagacgacggccagtgtcgacatgactgaagagatagcaggtttccagacctccccgaaggcgcaaaacacttcttgcggcgatggttcctggctcttcgatctgctgtttggtcgcaggagtggcgaaaatgcatctggatcctacggtcattcagc

SEQ ID NO: 2860 - DNA, 158 bp, synthetic construct
  misc_feature 1..158: note = Synthetic nucleic acid
  source 1..158: mol_type = other DNA
cagacgacggccagtgtcgacatgagaaagactttcttaaccctgctttgtgtcagtagcgcaacacttcttgcggcgatggttcctggctcttcgatcttttcggcttacgcaacattacgggtggattatcaaagaggatcctacggtcattcagc

SEQ ID NO: 2861 - DNA, 158 bp, synthetic construct
  misc_feature 1..158: note = Synthetic nucleic acid
  source 1..158: mol_type = other DNA
cagacgacggccagtgtcgacatgagactgacatctaaagggcgctatgccgtgaccgcaataacacttcttgcggcgatggttcctggctcttcgatccgcacacaagacgcgatcgacgttaagttacgcgctaagggatcctacggtcattcagc

SEQ ID NO: 2862 - DNA, 158 bp, synthetic construct
  misc_feature 1..158: note = Synthetic nucleic acid
  source 1..158: mol_type = other DNA
cagacgacggccagtgtcgacatgagtgagatagtaatacgccacgcagaaacacgggattaaacacttcttgcggcgatggttcctggctcttcgatcgaatatgtcgatgcatattatatggcgcgggtgaagctaggatcctacggtcattcagc

SEQ ID NO: 2863 - DNA, 158 bp, synthetic construct
  misc_feature 1..158: note = Synthetic nucleic acid
  source 1..158: mol_type = other DNA
cagacgacggccagtgtcgacatgcaatcctggtatttactgtactgcaagcgcgggaacacttcttgcggcgatggttcctggctcttcgatcagattaagcacagtgtgaagaataccgagttccgcaaactctacggatcctacggtcattcagc

SEQ ID NO: 2864 - DNA, 158 bp, synthetic construct
  misc_feature 1..158: note = Synthetic nucleic acid
  source 1..158: mol_type = other DNA
cagacgacggccagtgtcgacatgctggaagatctgcgcgccaacagctggagtttaaacacttcttgcggcgatggttcctggctcttcgatccgctggtggtgggagaaaaagcgcgagtgaaggtaattaaagccggatcctacggtcattcagc

SEQ ID NO: 2865 - DNA, 158 bp, synthetic construct
  misc_feature 1..158: note = Synthetic nucleic acid
  source 1..158: mol_type = other DNA
cagacgacggccagtgtcgacatggaagacgaaacgttgggattttttaagaaaacatcttcatctcatgctaacacttcttgcggcgatggttcctggctcttcgatcccagtcggcggttcttccagttgcaatgcggatcctacggtcattcagc

SEQ ID NO: 2866 - DNA, 158 bp, synthetic construct
  misc_feature 1..158: note = Synthetic nucleic acid
  source 1..158: mol_type = other DNA
cagacgacggccagtgtcgacatggtctggattgattacgccataatcgcggtgattgctttttcaacacttcttgcggcgatggttcctggctcttcgatcctgcaaagctcgtcaagtttcttgcccagagcggccggatcctacggtcattcagc

SEQ ID NO: 2867 - DNA, 158 bp, synthetic construct
  misc_feature 1..158: note = Synthetic nucleic acid
  source 1..158: mol_type = other DNA
cagacgacggccagtgtcgacatgttggatgtatttactccattgttgaaactttttgctaacgagccactaacacttcttgcggcgatggttcctggctcttcgatcaacagcaggagtagacgttttaatcgtctcggatcctacggtcattcagc

SEQ ID NO: 2868 - DNA, 158 bp, synthetic construct
  misc_feature 1..158: note = Synthetic nucleic acid
  source 1..158: mol_type = other DNA
cagacgacggccagtgtcgacgtggcgagctatcgtagccagggacgctgggtaatctggaacacttcttgcggcgatggttcctggctcttcgatctgctgatgcgcaaagtccgtcagcagtttgcagtgcaagtcggatcctacggtcattcagc

SEQ ID NO: 2869 - DNA, 158 bp, synthetic construct
  misc_feature 1..158: note = Synthetic nucleic acid
  source 1..158: mol_type = other DNA
cagacgacggccagtgtcgacgtgtttaaatttcttgtattaacattaggcattatctcttgccaggcttacgcaaacacttcttgcggcgatggttcctggctcttcgatcatccaagccctttgacaagaggacttggatcctacggtcattcagc

SEQ ID NO: 2870 - DNA, 158 bp, synthetic construct
  misc_feature 1..158: note = Synthetic nucleic acid
  source 1..158: mol_type = other DNA
cagacgacggccagtgtcgacatgcaagtttttatcatgcgtcacggcgacgcagcaacacttcttgcggcgatggttcctggctcttcgatctggcagatgagcccgtgtaatctgaagatggcaaaagctatcaaaggatcctacggtcattcagc

SEQ ID NO: 2871 - DNA, 158 bp, synthetic construct
  misc_feature 1..158: note = Synthetic nucleic acid
  source 1..158: mol_type = other DNA
cagacgacggccagtgtcgacatgcgtaaattaactgcactgtttgttgcctctaccctggctaacacttcttgcggcgatggttcctggctcttcgatccagcggcaaaaggtaaaatgcctgcaactgctgaaggcggatcctacggtcattcagc

SEQ ID NO: 2872 - DNA, 158 bp, synthetic construct
  misc_feature 1..158: note = Synthetic nucleic acid
  source 1..158: mol_type = other DNA
cagacgacggccagtgtcgacatgtcgcaactgacccatatcaacgccgctggcgaagcaacacttcttgcggcgatggttcctggctcttcgatcggcggcaagtcgggtgactttaaggtggaagcggatgattggggatcctacggtcattcagc

SEQ ID NO: 2873 - DNA, 158 bp, synthetic construct
  misc_feature 1..158: note = Synthetic nucleic acid
  source 1..158: mol_type = other DNA
cagacgacggccagtgtcgacgtgaaaaagtggttattagctgcaggtctcggtttagcactaacacttcttgcggcgatggttcctggctcttcgatcaaagacatcactgccgacgtactgaaacaggttaaagcgggatcctacggtcattcagc

SEQ ID NO: 2874 - DNA, 158 bp, synthetic construct
  misc_feature 1..158: note = Synthetic nucleic acid
  source 1..158: mol_type = other DNA
cagacgacggccagtgtcgacatgaaacttcaggtattaccgttaagtcaggaagcctttagtgcttatggaacacttcttgcggcgatggttcctggctcttcgatcattcctgaacaggaactctgttttgcgatcggatcctacggtcattcagc

SEQ ID NO: 2875 - DNA, 158 bp, synthetic construct
  misc_feature 1..158: note = Synthetic nucleic acid
  source 1..158: mol_type = other DNA
cagacgacggccagtgtcgacatgaacaaggttgctcaatattaccgtgaactggttgcgtcactgagaacacttcttgcggcgatggttcctggctcttcgatcgaccagttccagagacgcccgtttgagccgcgtggatcctacggtcattcagc

SEQ ID NO: 2876 - DNA, 158 bp, synthetic construct
  misc_feature 1..158: note = Synthetic nucleic acid
  source 1..158: mol_type = other DNA
cagacgacggccagtgtcgacatgacaaacctgacactggatgtaaacattatcgatttcccatcaatacctaacacttcttgcggcgatggttcctggctcttcgatcaaacggatgtttatgtgccgttggcgtacggatcctacggtcattcagc

SEQ ID NO: 2877 - DNA, 158 bp, synthetic construct
  misc_feature 1..158: note = Synthetic nucleic acid
  source 1..158: mol_type = other DNA
cagacgacggccagtgtcgacatgacgaagaaaaaagcacataaacctggttcagcgaccataacacttcttgcggcgatggttcctggctcttcgatcgtggataaagcacgtatcatgaaaaacgcccaccgtcccggatcctacggtcattcagc

SEQ ID NO: 2878 - DNA, 158 bp, synthetic construct
  misc_feature 1..158: note = Synthetic nucleic acid
  source 1..158: mol_type = other DNA
cagacgacggccagtgtcgacatgataaagcacctggtagcacccctggttttcacctcactaatactgaaacacttcttgcggcgatggttcctggctcttcgatcccgcgtcgcagtggtgattactacccctacgggatcctacggtcattcagc

SEQ ID NO: 2879 - DNA, 158 bp, synthetic construct
  misc_feature 1..158: note = Synthetic nucleic acid
  source 1..158: mol_type = other DNA
cagacgacggccagtgtcgacatgatggaacagtcactcatcccacagacaccggtacttcaacacttcttgcggcgatggttcctggctcttcgatccaggcaaatctattcgttcgcagaacacggtctgctttacggatcctacggtcattcagc

SEQ ID NO: 2880 - DNA, 158 bp, synthetic construct
  misc_feature 1..158: note = Synthetic nucleic acid
  source 1..158: mol_type = other DNA
cagacgacggccagtgtcgacatggctgatgaaattgatgcaatggctttatatcgagcctggaacacttcttgcggcgatggttcctggctcttcgatctggaagattttgtattgaccacaaacaaaaatgcgcccggatcctacggtcattcagc

SEQ ID NO: 2881 - DNA, 158 bp, synthetic construct
  misc_feature 1..158: note = Synthetic nucleic acid
  source 1..158: mol_type = other DNA
cagacgacggccagtgtcgacatgaaacgaattgcgtttgtgggtagcgtcggggcaaacacttcttgcggcgatggttcctggctcttcgatcccaaacaggaggaagcaggtgaaaaaactcatcacagcgaatctggatcctacggtcattcagc

SEQ ID NO: 2882 - DNA, 158 bp, synthetic construct
  misc_feature 1..158: note = Synthetic nucleic acid
  source 1..158: mol_type = other DNA
cagacgacggccagtgtcgacatgaatattcgccgtaaaaaccgcttgtggattgcctgtgccgtaacacttcttgcggcgatggttcctggctcttcgatccgcccggcgagtgtttataaggacccagcatcacttggatcctacggtcattcagc

SEQ ID NO: 2883 - DNA, 158 bp, synthetic construct
  misc_feature 1..158: note = Synthetic nucleic acid
  source 1..158: mol_type = other DNA
cagacgacggccagtgtcgacatgaatcacagcgaaacaattaccatcgaatgcaccattaacggaacacttcttgcggcgatggttcctggctcttcgatcgtaaatacagttctggattgcgagaaaacgaagtatggatcctacggtcattcagc

SEQ ID NO: 2884 - DNA, 158 bp, synthetic construct
  misc_feature 1..158: note = Synthetic nucleic acid
  source 1..158: mol_type = other DNA
cagacgacggccagtgtcgacatgacacccgcagttaaattactcgaaaaaaacaagatttcgtttcaaatccataaacacttcttgcggcgatggttcctggctcttcgatctgctgatatcgcccgccgcgatgtaggatcctacggtcattcagc

SEQ ID NO: 2885 - DNA, 158 bp, synthetic construct
  misc_feature 1..158: note = Synthetic nucleic acid
  source 1..158: mol_type = other DNA
cagacgacggccagtgtcgacatgacagtggcgtatattgccataggcagcaatctggaacacttcttgcggcgatggttcctggctcttcgatcaatcttacatacaagagcatttgacaaattaaacaaatggggaggatcctacggtcattcagc

SEQ ID NO: 2886 - DNA, 158 bp, synthetic construct
  misc_feature 1..158: note = Synthetic nucleic acid
  source 1..158: mol_type = other DNA
cagacgacggccagtgtcgacatgatcaaagagtgggctaccgtcgtctcctggcaaaacgaacacttcttgcggcgatggttcctggctcttcgatctgtgcgatttgaaacatcttcggaagacgcgagccagtcgggatcctacggtcattcagc

SEQ ID NO: 2887 - DNA, 158 bp, synthetic construct
  misc_feature 1..158: note = Synthetic nucleic acid
  source 1..158: mol_type = other DNA
cagacgacggccagtgtcgacatgatcagtctgattgcggcgttagcggtagatcgcgttataacacttcttgcggcgatggttcctggctcttcgatctctcacagctattgctttgagattctggagcggcggtcaggatcctacggtcattcagc

SEQ ID NO: 2888 - DNA, 158 bp, synthetic construct
  misc_feature 1..158: note = Synthetic nucleic acid
  source 1..158: mol_type = other DNA
cagacgacggccagtgtcgacatgcaaaaacgggcgatttatccgggtactttcgatcccattacaacacttcttgcggcgatggttcctggctcttcgatcaatgtccatcaggcgctgatggcgaagttagcgctgggatcctacggtcattcagc

SEQ ID NO: 2889 - DNA, 158 bp, synthetic construct
  misc_feature 1..158: note = Synthetic nucleic acid
  source 1..158: mol_type = other DNA
cagacgacggccagtgtcgacatgcgaattggacacggttttgacgtacatgcctttggcaacacttcttgcggcgatggttcctggctcttcgatccctgtgaagcggtggcgctactcattaaggcaacaaaagttggatcctacggtcattcagc

SEQ ID NO: 2890 - DNA, 158 bp, synthetic construct
  misc_feature 1..158: note = Synthetic nucleic acid
  source 1..158: mol_type = other DNA
cagacgacggccagtgtcgacatgttcacgattaaaacagatgatctcacccatccagcagtgcaaaacacttcttgcggcgatggttcctggctcttcgatccattgacgctatgcgaaaataatgaattgccacaaggatcctacggtcattcagc

SEQ ID NO: 2891 - DNA, 158 bp, synthetic construct
  misc_feature 1..158: note = Synthetic nucleic acid
  source 1..158: mol_type = other DNA
cagacgacggccagtgtcgacatgtttttacgtcaggaagactttgccacggtagtgcgctaacacttcttgcggcgatggttcctggctcttcgatcttttctcgctgagaagcgtaccggagtacccggattaaacggatcctacggtcattcagc

SEQ ID NO: 2892 - DNA, 158 bp, synthetic construct
  misc_feature 1..158: note = Synthetic nucleic acid
  source 1..158: mol_type = other DNA
cagacgacggccagtgtcgacatgaaaacgcccctggttacccgggaagggtatgaaaaaaacacttcttgcggcgatggttcctggctcttcgatccgagctggtatgttaatgctatcgagtacgtgaaaccgtctggatcctacggtcattcagc

SEQ ID NO: 2893 - DNA, 158 bp, synthetic construct
  misc_feature 1..158: note = Synthetic nucleic acid
  source 1..158: mol_type = other DNA
cagacgacggccagtgtcgacatgaaacagctttcctttttacccggcgagatgacgccaaacacttcttgcggcgatggttcctggctcttcgatcgcaggcaaatctattcgttcgcagaacacggtctgcttgaaggatcctacggtcattcagc

SEQ ID NO: 2894 - DNA, 158 bp, synthetic construct
  misc_feature 1..158: note = Synthetic nucleic acid
  source 1..158: mol_type = other DNA
cagacgacggccagtgtcgacatgaaactcatcagtaacgatctgcgcgatggcgataaattgcaacacttcttgcggcgatggttcctggctcttcgatctctggcaagcgcctcgattactgcgatgtttagtaaaggatcctacggtcattcagc

SEQ ID NO: 2895 - DNA, 158 bp, synthetic construct
  misc_feature 1..158: note = Synthetic nucleic acid
  source 1..158: mol_type = other DNA
cagacgacggccagtgtcgacatgacatcgctggtcgttcctggtctggatacgaacacttcttgcggcgatggttcctggctcttcgatcatgatgaagggcaaaacaacgttaccgaaaactatttcctccacagcggatcctacggtcattcagc

SEQ ID NO: 2896 - DNA, 158 bp, synthetic construct
  misc_feature 1..158: note = Synthetic nucleic acid
  source 1..158: mol_type = other DNA
cagacgacggccagtgtcgacatgaccagtccaaatattctcttaacccgtattgataaccgtctggttaacacttcttgcggcgatggttcctggctcttcgatcctggcgatcaaaaagaacaaatccctgacctgggatcctacggtcattcagc

SEQ ID NO: 2897 - DNA, 158 bp, synthetic construct
  misc_feature 1..158: note = Synthetic nucleic acid
  source 1..158: mol_type = other DNA
cagacgacggccagtgtcgacatgcaagctattccgatgaccttacgcggcgctaacacttcttgcggcgatggttcctggctcttcgatccgggcggcgaagtagaatttgaagtaattaaggtggaatacctggtaggatcctacggtcattcagc

SEQ ID NO: 2898 - DNA, 158 bp, synthetic construct
  misc_feature 1..158: note = Synthetic nucleic acid
  source 1..158: mol_type = other DNA
cagacgacggccagtgtcgacatgcttaaccagctcgataacctgacggagcgcgtcagaggaagtaaaacacttcttgcggcgatggttcctggctcttcgatccttgacgccgcccgcgtcaaacatcctgctccgggatcctacggtcattcagc

SEQ ID NO: 2899 - DNA, 158 bp, synthetic construct
  misc_feature 1..158: note = Synthetic nucleic acid
  source 1..158: mol_type = other DNA
cagacgacggccagtgtcgacatgcttagtggtaaagacttaggccgagcgatagagcaaacacttcttgcggcgatggttcctggctcttcgatctctgaacggaaaagccagaacatcacaaaaactggaactgggggatcctacggtcattcagc

SEQ ID NO: 2900 - DNA, 158 bp, synthetic construct
  misc_feature 1..158: note = Synthetic nucleic acid
  source 1..158: mol_type = other DNA
cagacgacggccagtgtcgacatgaaaaaaatactcgaagcaatactggcgattaatctcgccgtactttaacacttcttgcggcgatggttcctggctcttcgatcttctctaacgtcgccaccgcaaggagctactggatcctacggtcattcagc

SEQ ID NO: 2901 - DNA, 158 bp, synthetic construct
  misc_feature 1..158: note = Synthetic nucleic acid
  source 1..158: mol_type = other DNA
cagacgacggccagtgtcgacatgaaatacaagcatttgatcctgtctttaagcctgataatgctggggccattaacacttcttgcggcgatggttcctggctcttcgatcgttcctgtcatgccgtggcggcaatgtggatcctacggtcattcagc

SEQ ID NO: 2902 - DNA, 158 bp, synthetic construct
  misc_feature 1..158: note = Synthetic nucleic acid
  source 1..158: mol_type = other DNA
cagacgacggccagtgtcgacatgaaccggtttattattgcggatgcgacgaaatgtatcggttgccgtacaacacttcttgcggcgatggttcctggctcttcgatccggcatcggctacggcagcagcctgttcttggatcctacggtcattcagc

SEQ ID NO: 2903 - DNA, 158 bp, synthetic construct
  misc_feature 1..158: note = Synthetic nucleic acid
  source 1..158: mol_type = other DNA
cagacgacggccagtgtcgacatgaactacgagattaagcaggaagagaaacgtaccgttgcaaacacttcttgcggcgatggttcctggctcttcgatctcgaaatgtatgttgcggtgcagccaaaacatcactttggatcctacggtcattcagc

SEQ ID NO: 2904 - DNA, 158 bp, synthetic construct
  misc_feature 1..158: note = Synthetic nucleic acid
  source 1..158: mol_type = other DNA
cagacgacggccagtgtcgacatgccaaatattgttttaagccggattgatgaacgcttgattcacgaacacttcttgcggcgatggttcctggctcttcgatcagagcctgctgtggacctctttaaattacttagtggatcctacggtcattcagc

SEQ ID NO: 2905 - DNA, 158 bp, synthetic construct
  misc_feature 1..158: note = Synthetic nucleic acid
  source 1..158: mol_type = other DNA
cagacgacggccagtgtcgacatgctaaacatcgtactttacgaaccagaaattccgccaaatactggaacacttcttgcggcgatggttcctggctcttcgatcttggggtatccgggagcggtattgagagatccgggatcctacggtcattcagc

SEQ ID NO: 2906 - DNA, 158 bp, synthetic construct
  misc_feature 1..158: note = Synthetic nucleic acid
  source 1..158: mol_type = other DNA
cagacgacggccagtgtcgacatgggcaggataagctcgggaggaatgatgtttaaggcaataaaacacttcttgcggcgatggttcctggctcttcgatccctggaaaaccatccggatggctttaattttaaagtcggatcctacggtcattcagc

SEQ ID NO: 2907 - DNA, 158 bp, synthetic construct
  misc_feature 1..158: note = Synthetic nucleic acid
  source 1..158: mol_type = other DNA
cagacgacggccagtgtcgacatgggtgtgatcgaatttctgttagcgttggcgcaggatatgatcaacacttcttgcggcgatggttcctggctcttcgatcgattatggttgtaccgcaagcgccctcgcgtaagaggatcctacggtcattcagc

SEQ ID NO: 2908 - DNA, 158 bp, synthetic construct
  misc_feature 1..158: note = Synthetic nucleic acid
  source 1..158: mol_type = other DNA
cagacgacggccagtgtcgacatgaaaacacaacgtggttatacgctgattgaaacgctggtcaacacttcttgcggcgatggttcctggctcttcgatcggctttgtcagcaaggagaaacagaaggatgcctgagtggatcctacggtcattcagc

SEQ ID NO: 2909 - DNA, 158 bp, synthetic construct
  misc_feature 1..158: note = Synthetic nucleic acid
  source 1..158: mol_type = other DNA
cagacgacggccagtgtcgacatgaacattattgaagctaacgttgctaccccggacgctaacacttcttgcggcgatggttcctggctcttcgatccgcttgaaatgattaatgtattgaaagccatcaaggccgcaggatcctacggtcattcagc

SEQ ID NO: 2910 - DNA, 158 bp, synthetic construct
  misc_feature 1..158: note = Synthetic nucleic acid
  source 1..158: mol_type = other DNA
cagacgacggccagtgtcgacatgaatccactgaaagccggtgatatcgcaccgaaatttagcttaacacttcttgcggcgatggttcctggctcttcgatcgacgttgtgctgaactggctgaaagaacacgccgccggatcctacggtcattcagc

SEQ ID NO: 2911 - DNA, 158 bp, synthetic construct
  misc_feature 1..158: note = Synthetic nucleic acid
  source 1..158: mol_type = other DNA
cagacgacggccagtgtcgacatgaccgaaatacaacgcctgctgaccgaaacgattgaaacacttcttgcggcgatggttcctggctcttcgatctacgatatttttaccctcgctcgcgccgaatcaacatctggaggatcctacggtcattcagc

SEQ ID NO: 2912 - DNA, 158 bp, synthetic construct
  misc_feature 1..158: note = Synthetic nucleic acid
  source 1..158: mol_type = other DNA
cagacgacggccagtgtcgacatgattcagtcacaaattaaccgcaatattcgtcttgatcttgccgataacacttcttgcggcgatggttcctggctcttcgatcatggtaaatatctgccgaccaaaccgttcagtggatcctacggtcattcagc

SEQ ID NO: 2913 - DNA, 158 bp, synthetic construct
  misc_feature 1..158: note = Synthetic nucleic acid
  source 1..158: mol_type = other DNA
cagacgacggccagtgtcgacatgcgaagctcggctaagcaagaagaactagttaaagcatttaaagaacacttcttgcggcgatggttcctggctcttcgatcagcgattttagagctgttcgaccaggagctttatggatcctacggtcattcagc

SEQ ID NO: 2914 - DNA, 158 bp, synthetic construct
  misc_feature 1..158: note = Synthetic nucleic acid
  source 1..158: mol_type = other DNA
cagacgacggccagtgtcgacatgctaagtaacgatattctgcgcagcgtgcgctacattttgaaagcaacacttcttgcggcgatggttcctggctcttcgatcctggcagcgcgccagcatgtgaaaaaaggcaccggatcctacggtcattcagc

SEQ ID NO: 2915 - DNA, 158 bp, synthetic construct
  misc_feature 1..158: note = Synthetic nucleic acid
  source 1..158: mol_type = other DNA
cagacgacggccagtgtcgacatggatattcgtaagattaaaaaactgatcgagctggttgaagaatcaggcataacacttcttgcggcgatggttcctggctcttcgatcgacgagccgctggtcgtcatcgagagtggatcctacggtcattcagc

SEQ ID NO: 2916 - DNA, 158 bp, synthetic construct
  misc_feature 1..158: note = Synthetic nucleic acid
  source 1..158: mol_type = other DNA
cagacgacggccagtgtcgacatggccgacgttcacgataaggccactcgcagcaaaaatataacacttcttgcggcgatggttcctggctcttcgatcgcgcagatcgacacgcaggggattcatttactcgctagaggatcctacggtcattcagc

SEQ ID NO: 2917 - DNA, 158 bp, synthetic construct
  misc_feature 1..158: note = Synthetic nucleic acid
  source 1..158: mol_type = other DNA
cagacgacggccagtgtcgacgtgaatcttaacgcaacaatcctcggccaggccatcgaacacttcttgcggcgatggttcctggctcttcgatctgctaacagcgacatcgtggataaacttgtcgctgaactgagtggatcctacggtcattcagc

SEQ ID NO: 2918 - DNA, 158 bp, synthetic construct
  misc_feature 1..158: note = Synthetic nucleic acid
  source 1..158: mol_type = other DNA
cagacgacggccagtgtcgacgtgactgacgttttactctgtgttggcaatagcatgatgggcgatgataacacttcttgcggcgatggttcctggctcttcgatcgcttcgcgcagttagcggtggaagaagaggagggatcctacggtcattcagc

SEQ ID NO: 2919 - DNA, 158 bp, synthetic construct
  misc_feature 1..158: note = Synthetic nucleic acid
  source 1..158: mol_type = other DNA
cagacgacggccagtgtcgacatgaaaatacgttcactaagccggtttgtactggcaagtacaatgttaacacttcttgcggcgatggttcctggctcttcgatcctgccaacattagcggactgcactaacgacacaggatcctacggtcattcagc

SEQ ID NO: 2920 - DNA, 158 bp, synthetic construct
  misc_feature 1..158: note = Synthetic nucleic acid
  source 1..158: mol_type = other DNA
cagacgacggccagtgtcgacatgacaatactttcactaagtcggtttatgctggcgggtgtactgaacacttcttgcggcgatggttcctggctcttcgatcttctgtccactctcggagactgcagcaacgacgggggatcctacggtcattcagc

SEQ ID NO: 2921 - DNA, 158 bp, synthetic construct
  misc_feature 1..158: note = Synthetic nucleic acid
  source 1..158: mol_type = other DNA
cagacgacggccagtgtcgacatgagtcaggtgatcctcgatttacaactggcatgtgaagataattcaacacttcttgcggcgatggttcctggctcttcgatctatgaggatccgtacattgccgagaaagaacgaggatcctacggtcattcagc

SEQ ID NO: 2922 - DNA, 158 bp, synthetic construct
  misc_feature 1..158: note = Synthetic nucleic acid
  source 1..158: mol_type = other DNA
cagacgacggccagtgtcgacatgagtcgtcgcgcaggtacgccaacagcaaaaaaagtaacacttcttgcggcgatggttcctggctcttcgatcgacgcttttcgtttgtttacccagaaacacggtgccaaactaggatcctacggtcattcagc

SEQ ID NO: 2923 - DNA, 158 bp, synthetic construct
  misc_feature 1..158: note = Synthetic nucleic acid
  source 1..158: mol_type = other DNA
cagacgacggccagtgtcgacatgattaaacgcgtattggttgtttcaatggtaggtctgtctcttgtcggttaacacttcttgcggcgatggttcctggctcttcgatccagtcaggtgaccgtttctccgcgctcgggatcctacggtcattcagc

SEQ ID NO: 2924 - DNA, 158 bp, synthetic construct
  misc_feature 1..158: note = Synthetic nucleic acid
  source 1..158: mol_type = other DNA
cagacgacggccagtgtcgacatgatttttggacatatcgcgcagcccaatccgtaacacttcttgcggcgatggttcctggctcttcgatcgatacgaaaaattgtggttaaagtcgcattaacggcgctgaatattggatcctacggtcattcagc

SEQ ID NO: 2925 - DNA, 158 bp, synthetic construct
  misc_feature 1..158: note = Synthetic nucleic acid
  source 1..158: mol_type = other DNA
cagacgacggccagtgtcgacatgcttaaacaggtagaaattttcaccgatggttcgtgtctggaacacttcttgcggcgatggttcctggctcttcgatccacactggaagatacaggctaccaagttgaagtttcaggatcctacggtcattcagc

SEQ ID NO: 2926 - DNA, 158 bp, synthetic construct
  misc_feature 1..158: note = Synthetic nucleic acid
  source 1..158: mol_type = other DNA
cagacgacggccagtgtcgacatgtctgccgtactgaccgctgaacaagccctgaaattaaacacttcttgcggcgatggttcctggctcttcgatctttatattgccagtgccaccgccacctatatggtaggtagtggatcctacggtcattcagc

SEQ ID NO: 2927 - DNA, 158 bp, synthetic construct
  misc_feature 1..158: note = Synthetic nucleic acid
  source 1..158: mol_type = other DNA
cagacgacggccagtgtcgacatgtctgtttcacgtcgggtaatacatcacggactttattttgcaaacacttcttgcggcgatggttcctggctcttcgatcatatttcatgtcctgaaacagactctttaagtaaaggatcctacggtcattcagc

SEQ ID NO: 2928 - DNA, 158 bp, synthetic construct
  misc_feature 1..158: note = Synthetic nucleic acid
  source 1..158: mol_type = other DNA
cagacgacggccagtgtcgacgtgaagctgcaacttgtcgccgtgggaacgaaaatgccaacacttcttgcggcgatggttcctggctcttcgatcgcgtggagcatcaccaccaaccatccttatcaccgtgagaagggatcctacggtcattcagc

SEQ ID NO: 2929 - DNA, 158 bp, synthetic construct
  misc_feature 1..158: note = Synthetic nucleic acid
  source 1..158: mol_type = other DNA
cagacgacggccagtgtcgacatgaaattacgtgattcgctggcggaaaataaatccatccgcctgcaaacacttcttgcggcgatggttcctggctcttcgatcgatctcattgaccgcaccaacgcggcagctgccggatcctacggtcattcagc

SEQ ID NO: 2930 - DNA, 158 bp, synthetic construct
  misc_feature 1..158: note = Synthetic nucleic acid
  source 1..158: mol_type = other DNA
cagacgacggccagtgtcgacatgactgattacgcgataagcaagaaaagcaagcgatcgctttaacacttcttgcggcgatggttcctggctcttcgatccaccgacgtgctgtataccgcttttattctgcgaccgggatcctacggtcattcagc

SEQ ID NO: 2931 - DNA, 158 bp, synthetic construct
  misc_feature 1..158: note = Synthetic nucleic acid
  source 1..158: mol_type = other DNA
cagacgacggccagtgtcgacatgatgatgggtgaagtacagtcattaccgtctgctgggttaaacacttcttgcggcgatggttcctggctcttcgatcaggttgtggtgaaggttaaggctgatttaatggcttccggatcctacggtcattcagc

SEQ ID NO: 2932 - DNA, 158 bp, synthetic construct
  misc_feature 1..158: note = Synthetic nucleic acid
  source 1..158: mol_type = other DNA
cagacgacggccagtgtcgacatgcgtttctgccttattttgatcacagcactgcttctgaacacttcttgcggcgatggttcctggctcttcgatctctattggcagaaaaatttctggcaggcgagacgaatcagaggatcctacggtcattcagc

SEQ ID NO: 2933 - DNA, 158 bp, synthetic construct
  misc_feature 1..158: note = Synthetic nucleic acid
  source 1..158: mol_type = other DNA
cagacgacggccagtgtcgacatggaaaagaaattaccccgcattaaagcgctgctaacccccaacacttcttgcggcgatggttcctggctcttcgatcgtaccggcgcacgcttgctggaagatgaacaaaaccgtggatcctacggtcattcagc

SEQ ID NO: 2934 - DNA, 158 bp, synthetic construct
  misc_feature 1..158: note = Synthetic nucleic acid
  source 1..158: mol_type = other DNA
cagacgacggccagtgtcgacatggattttccacaaagggttaatggttgggcgctatatgctaacacttcttgcggcgatggttcctggctcttcgatcgggaaaccctcacccgagaaacagaagaaacccatttcggatcctacggtcattcagc

SEQ ID NO: 2935 - DNA, 158 bp, synthetic construct
  misc_feature 1..158: note = Synthetic nucleic acid
  source 1..158: mol_type = other DNA
cagacgacggccagtgtcgacatgaaggctttcaataagctgttttccctcgttgttgcatctaacacttcttgcggcgatggttcctggctcttcgatctggtgatgaaagccgctggttttaaagaagtgaaacttggatcctacggtcattcagc

SEQ ID NO: 2936 - DNA, 158 bp, synthetic construct
  misc_feature 1..158: note = Synthetic nucleic acid
  source 1..158: mol_type = other DNA
cagacgacggccagtgtcgacatgacaactcaggtccgcaaaaacgtcatggatatgtttatcgataacacttcttgcggcgatggttcctggctcttcgatctgctgtcgatctgggttatgcagcttattgttccaggatcctacggtcattcagc

SEQ ID NO: 2937 - DNA, 158 bp, synthetic construct
  misc_feature 1..158: note = Synthetic nucleic acid
  source 1..158: mol_type = other DNA
cagacgacggccagtgtcgacatgacacacgataataaattgcaggttgaagctattaaacgcggcaaacacttcttgcggcgatggttcctggctcttcgatcagagttttcccataatgtggtgctggccaatctgggatcctacggtcattcagc

SEQ ID NO: 2938 - DNA, 158 bp, synthetic construct
  misc_feature 1..158: note = Synthetic nucleic acid
  source 1..158: mol_type = other DNA
cagacgacggccagtgtcgacatgactatttgggaaataagcgagaaagccgattacatcgcacagcgaacacttcttgcggcgatggttcctggctcttcgatccaactggtaaagggacaaagcccggcagcaagtggatcctacggtcattcagc

SEQ ID NO: 2939 - DNA, 158 bp, synthetic construct
  misc_feature 1..158: note = Synthetic nucleic acid
  source 1..158: mol_type = other DNA
cagacgacggccagtgtcgacatgagtcaggacagtaaagttttctttcgtatattcctcggtatcggtctggtaaacacttcttgcggcgatggttcctggctcttcgatcgcaggaaacggaagtcccgcccacatggatcctacggtcattcagc

SEQ ID NO: 2940 - DNA, 158 bp, synthetic construct
  misc_feature 1..158: note = Synthetic nucleic acid
  source 1..158: mol_type = other DNA
cagacgacggccagtgtcgacatgatgaatcgagtaattccgctccctgatgagcaggcaacattagaaacacttcttgcggcgatggttcctggctcttcgatcggtgaattgttgctggcgcgtttagccggtattggatcctacggtcattcagc

SEQ ID NO: 2941 - DNA, 158 bp, synthetic construct
  misc_feature 1..158: note = Synthetic nucleic acid
  source 1..158: mol_type = other DNA
cagacgacggccagtgtcgacatgattaaatcatggtgggcagaaaaatccacatcggaaaaacagatcaacacttcttgcggcgatggttcctggctcttcgatctcaggcatttgtccttcagggagcaacaaatcggatcctacggtcattcagc

SEQ ID NO: 2942 - DNA, 158 bp, synthetic construct
  misc_feature 1..158: note = Synthetic nucleic acid
  source 1..158: mol_type = other DNA
cagacgacggccagtgtcgacatgattgaatggcaagatctgcatcactctgaattatcggtttcccaaacacttcttgcggcgatggttcctggctcttcgatcattgggatggcacgcgaggtaattcaggcgactggatcctacggtcattcagc

SEQ ID NO: 2943 - DNA, 158 bp, synthetic construct
  misc_feature 1..158: note = Synthetic nucleic acid
  source 1..158: mol_type = other DNA
cagacgacggccagtgtcgacatggcggaacacctgatgagcgatgtacctttctggaacacttcttgcggcgatggttcctggctcttcgatcactggcaggatcatatcttaaataaacctgactgggcgcagagtggatcctacggtcattcagc

SEQ ID NO: 2944 - DNA, 158 bp, synthetic construct
  misc_feature 1..158: note = Synthetic nucleic acid
  source 1..158: mol_type = other DNA
cagacgacggccagtgtcgacatgtttaaaccgcacgttaccgttgcttgcgtgaacacttcttgcggcgatggttcctggctcttcgatcagatgattggcgattttaactggccttttacaaagggtgtcatcgcaggatcctacggtcattcagc

SEQ ID NO: 2945 - DNA, 158 bp, synthetic construct
  misc_feature 1..158: note = Synthetic nucleic acid
  source 1..158: mol_type = other DNA
cagacgacggccagtgtcgacgtgagcagagtaaccgcgattatatccgctctgattatctgcataacacttcttgcggcgatggttcctggctcttcgatcggaacccagaagtatattaatgagcagtgcagattgggatcctacggtcattcagc

SEQ ID NO: 2946 - DNA, 158 bp, synthetic construct
  misc_feature 1..158: note = Synthetic nucleic acid
  source 1..158: mol_type = other DNA
cagacgacggccagtgtcgacatgacaacacagacacagtacgacctcgtacccgctaacgaacacttcttgcggcgatggttcctggctcttcgatcgcaccctgaatccagcgccattatgcgcattattgataccggatcctacggtcattcagc

SEQ ID NO: 2947 - DNA, 158 bp, synthetic construct
  misc_feature 1..158: note = Synthetic nucleic acid
  source 1..158: mol_type = other DNA
cagacgacggccagtgtcgacatgacaacacagacgcagcacgacctcgcacccaacacttcttgcggcgatggttcctggctcttcgatcccatgcaacatccagaggctcacgccattctgcgtattatcgacaaaggatcctacggtcattcagc

SEQ ID NO: 2948 - DNA, 158 bp, synthetic construct
  misc_feature 1..158: note = Synthetic nucleic acid
  source 1..158: mol_type = other DNA
cagacgacggccagtgtcgacatgacaatcacggacctggtactgattcttttcatcgccaacacttcttgcggcgatggttcctggctcttcgatcatctggaaaaaatttataagcttctcgtttcaactcaactgggatcctacggtcattcagc

SEQ ID NO: 2949 - DNA, 158 bp, synthetic construct
  misc_feature 1..158: note = Synthetic nucleic acid
  source 1..158: mol_type = other DNA
cagacgacggccagtgtcgacatgacaatttgggtggatgccgacgcgtgtcccaatgtaattaaaaacacttcttgcggcgatggttcctggctcttcgatcagtggtggctggaagtgcaacgtagtcgtggcgacggatcctacggtcattcagc

SEQ ID NO: 2950 - DNA, 158 bp, synthetic construct
  misc_feature 1..158: note = Synthetic nucleic acid
  source 1..158: mol_type = other DNA
cagacgacggccagtgtcgacatgagcgaaaaatacatcgtcacctgggacatgttgcagatccatgcaaacacttcttgcggcgatggttcctggctcttcgatctcgtattcgtcccgccaatctccggtcgcagaggatcctacggtcattcagc

SEQ ID NO: 2951 - DNA, 158 bp, synthetic construct
  misc_feature 1..158: note = Synthetic nucleic acid
  source 1..158: mol_type = other DNA
cagacgacggccagtgtcgacatgatggagttaatggtcgttcatccacatattttctggctcagtaacacttcttgcggcgatggttcctggctcttcgatcggataaccctacatatccgagccgtctcgtctaggggatcctacggtcattcagc

SEQ ID NO: 2952 - DNA, 158 bp, synthetic construct
  misc_feature 1..158: note = Synthetic nucleic acid
  source 1..158: mol_type = other DNA
cagacgacggccagtgtcgacatggaaaattatctgatcgacaatctggaccgtggcatcctggaaaacacttcttgcggcgatggttcctggctcttcgatctgcaaaacccgatcatgcgtaccatcaagcccctcggatcctacggtcattcagc

SEQ ID NO: 2953 - DNA, 158 bp, synthetic construct
  misc_feature 1..158: note = Synthetic nucleic acid
  source 1..158: mol_type = other DNA
cagacgacggccagtgtcgacatggaactgacgactcgcactttacctgcgcggaaacatattaacacttcttgcggcgatggttcctggctcttcgatcccgattatcagcgttatctcgcggaccgtctgaagggtggatcctacggtcattcagc

SEQ ID NO: 2954 - DNA, 158 bp, synthetic construct
  misc_feature 1..158: note = Synthetic nucleic acid
  source 1..158: mol_type = other DNA
cagacgacggccagtgtcgacatgttagataaaattgaccgtaagctgctggccttactgcagaacacttcttgcggcgatggttcctggctcttcgatcaacagattaaatacaccacttctttacccatcgaagcaggatcctacggtcattcagc

SEQ ID NO: 2955 - DNA, 158 bp, synthetic construct
  misc_feature 1..158: note = Synthetic nucleic acid
  source 1..158: mol_type = other DNA
cagacgacggccagtgtcgacatgttccggggagcaacgttagtcaatctcgacagcaaagaacacttcttgcggcgatggttcctggctcttcgatccggagacttatcggagcgactgcaggacttgtctctaggtggatcctacggtcattcagc

SEQ ID NO: 2956 - DNA, 158 bp, synthetic construct
  misc_feature 1..158: note = Synthetic nucleic acid
  source 1..158: mol_type = other DNA
cagacgacggccagtgtcgacgtgtctcagctttgtccctgtggtagtgctgtcgaaacacttcttgcggcgatggttcctggctcttcgatcccttgtggttcaggtaaaaaatttaaaaagtgctgcggccaaaacggatcctacggtcattcagc

SEQ ID NO: 2957 - DNA, 158 bp, synthetic construct
  misc_feature 1..158: note = Synthetic nucleic acid
  source 1..158: mol_type = other DNA
cagacgacggccagtgtcgacatgaaaaaaatcgacgttaagattctggacccgcgcgttgggaaaacacttcttgcggcgatggttcctggctcttcgatcggtgaaggcggctttggtcactctggtcgtcagagaggatcctacggtcattcagc

SEQ ID NO: 2958 - DNA, 158 bp, synthetic construct
  misc_feature 1..158: note = Synthetic nucleic acid
  source 1..158: mol_type = other DNA
cagacgacggccagtgtcgacatgaaaaacaaattgttatttatgatgttaacaatactgggtgcgcctgggattaacacttcttgcggcgatggttcctggctcttcgatctggctattcgcgtgacacaacgtttcggatcctacggtcattcagc

SEQ ID NO: 2959 - DNA, 158 bp, synthetic construct
  misc_feature 1..158: note = Synthetic nucleic acid
  source 1..158: mol_type = other DNA
cagacgacggccagtgtcgacatgaaacttttaaaagtagcagcaattgcagcaatcgtattctccggtaaacacttcttgcggcgatggttcctggctcttcgatctggtaacaacgcgaccgctcatcagtactttggatcctacggtcattcagc

SEQ ID NO: 2960 - DNA, 158 bp, synthetic construct
  misc_feature 1..158: note = Synthetic nucleic acid
  source 1..158: mol_type = other DNA
cagacgacggccagtgtcgacatgcaagaagggcaaaaccgtaaaacatcgtccctgagtattctaacacttcttgcggcgatggttcctggctcttcgatcctggctgaaattcgcgaaaaacagatggctggctcaggatcctacggtcattcagc

SEQ ID NO: 2961 - DNA, 158 bp, synthetic construct
  misc_feature 1..158: note = Synthetic nucleic acid
  source 1..158: mol_type = other DNA
cagacgacggccagtgtcgacgtgaacctctcacaagacggcatcaaattacatcgcggcaacttcaccgaacacttcttgcggcgatggttcctggctcttcgatcccagctgctgcgcgacaagcaggaggcgcctggatcctacggtcattcagc

SEQ ID NO: 2962 - DNA, 158 bp, synthetic construct
  misc_feature 1..158: note = Synthetic nucleic acid
  source 1..158: mol_type = other DNA
cagacgacggccagtgtcgacttgactactaacactcatactctgcagattgaagagattttagaacttctgccgaacacttcttgcggcgatggttcctggctcttcgatctgtgtgctcgtagccgggaggccggatcctacggtcattcagccgc

SEQ ID NO: 2963 - DNA, 158 bp, synthetic construct
  misc_feature 1..158: note = Synthetic nucleic acid
  source 1..158: mol_type = other DNA
cagacgacggccagtgtcgacatgatcatcggaaatattcataatcttcagccgtggctaccccaaacacttcttgcggcgatggttcctggctcttcgatcgttcgcaaagcagtagtgaagatgctgatggcgggaggatcctacggtcattcagc

SEQ ID NO: 2964 - DNA, 158 bp, synthetic construct
  misc_feature 1..158: note = Synthetic nucleic acid
  source 1..158: mol_type = other DNA
cagacgacggccagtgtcgacatgatctggataatgctcgccacgctggcggtagtgtttgtggttaacacttcttgcggcgatggttcctggctcttcgatcttcagcctgccgagggcgttcactggttgcatccgggatcctacggtcattcagc

SEQ ID NO: 2965 - DNA, 158 bp, synthetic construct
  misc_feature 1..158: note = Synthetic nucleic acid
  source 1..158: mol_type = other DNA
cagacgacggccagtgtcgacatggcagaaaccaaaattgttgttggtccgcagccgttcagcgtaaacacttcttgcggcgatggttcctggctcttcgatcgggagagcgatcagcaggcggcaaaacgctggataggatcctacggtcattcagc

SEQ ID NO: 2966 - DNA, 158 bp, synthetic construct
  misc_feature 1..158: note = Synthetic nucleic acid
  source 1..158: mol_type = other DNA
cagacgacggccagtgtcgacgtgaaggataaagtgtataagcgtcccgtttcgatcttagtggtaacacttcttgcggcgatggttcctggctcttcgatccaggcgattgaacagtttgtaattaacgctgcctcgggatcctacggtcattcagc

SEQ ID NO: 2967 - DNA, 158 bp, synthetic construct
  misc_feature 1..158: note = Synthetic nucleic acid
  source 1..158: mol_type = other DNA
cagacgacggccagtgtcgacttgtccacattagagcaaaaattaacagagatgattactgcgccagttaacacttcttgcggcgatggttcctggctcttcgatctccagaaggcgaacctggttccccactttgtcggatcctacggtcattcagc

SEQ ID NO: 2968 - DNA, 158 bp, synthetic construct
  misc_feature 1..158: note = Synthetic nucleic acid
  source 1..158: mol_type = other DNA
cagacgacggccagtgtcgacatgaaaagccatgacctgaagaaagcgctgtgtcaatgaacacttcttgcggcgatggttcctggctcttcgatcgtggggaatacctttaccccatcaaaaggttacgggaaagaaggatcctacggtcattcagc

SEQ ID NO: 2969 - DNA, 158 bp, synthetic construct
  misc_feature 1..158: note = Synthetic nucleic acid
  source 1..158: mol_type = other DNA
cagacgacggccagtgtcgacatgaagagtactgagtttcatcctgtccattatgatgcgcacgaacacttcttgcggcgatggttcctggctcttcgatcacgtttacgcgcttgtttttatgaagtaaaagaaccaggatcctacggtcattcagc

SEQ ID NO: 2970 - DNA, 158 bp, synthetic construct
  misc_feature 1..158: note = Synthetic nucleic acid
  source 1..158: mol_type = other DNA
cagacgacggccagtgtcgacatgaatcagtcgctcacccttgcttttttgattgccgccggaattaacacttcttgcggcgatggttcctggctcttcgatcttggcgcctggttggtagccagacgctcatttagtggatcctacggtcattcagc

SEQ ID NO: 2971 - DNA, 158 bp, synthetic construct
  misc_feature 1..158: note = Synthetic nucleic acid
  source 1..158: mol_type = other DNA
cagacgacggccagtgtcgacatgaggatcatcgataacttagaacagttccgccagatttacgcaacacttcttgcggcgatggttcctggctcttcgatcgtcaccatcgaagatggttatttccataacaaaagaggatcctacggtcattcagc

SEQ ID NO: 2972 - DNA, 158 bp, synthetic construct
  misc_feature 1..158: note = Synthetic nucleic acid
  source 1..158: mol_type = other DNA
cagacgacggccagtgtcgacatgcaagttattctgcttgataaagtagcaaacctgggtagcctaacacttcttgcggcgatggttcctggctcttcgatcttcgcgaaagtgatcgtaaacgtagtagctgaagttggatcctacggtcattcagc

SEQ ID NO: 2973 - DNA, 158 bp, synthetic construct
  misc_feature 1..158: note = Synthetic nucleic acid
  source 1..158: mol_type = other DNA
cagacgacggccagtgtcgacatgcattgcccattctgtttcgccgtggacactaaggtaattgactaacacttcttgcggcgatggttcctggctcttcgatcatttggcgaagagatcgcgcgcctggaggactccggatcctacggtcattcagc

SEQ ID NO: 2974 - DNA, 158 bp, synthetic construct
  misc_feature 1..158: note = Synthetic nucleic acid
  source 1..158: mol_type = other DNA
cagacgacggccagtgtcgacatggcggaaattggtatttttgtcggcaccatgtacgggaattcactaacacttcttgcggcgatggttcctggctcttcgatctgggtcgaacagtggggcacgctgttgtccaaaggatcctacggtcattcagc

SEQ ID NO: 2975 - DNA, 158 bp, synthetic construct
  misc_feature 1..158: note = Synthetic nucleic acid
  source 1..158: mol_type = other DNA
cagacgacggccagtgtcgacatgggtatcatagctcaaaataaaatcagttcattgggcatgctgttcgaacacttcttgcggcgatggttcctggctcttcgatcttccttcctgaccggcggttcactggttggtggatcctacggtcattcagc

SEQ ID NO: 2976 - DNA, 158 bp, synthetic construct
  misc_feature 1..158: note = Synthetic nucleic acid
  source 1..158: mol_type = other DNA
cagacgacggccagtgtcgacatgggtctgttcaattttgtgaaagatgccggagaaaaactctgggaaacacttcttgcggcgatggttcctggctcttcgatcccggggcaagtgttgcgtattccggaagagcgtggatcctacggtcattcagc

SEQ ID NO: 2977 - DNA, 158 bp, synthetic construct
  misc_feature 1..158: note = Synthetic nucleic acid
  source 1..158: mol_type = other DNA
cagacgacggccagtgtcgacatgtctgaatctgtacagagcaatagcgccgtcctggtgcaaacacttcttgcggcgatggttcctggctcttcgatcattgaagtgctggaaatcgatccggcactggaggcgtgtggatcctacggtcattcagc

SEQ ID NO: 2978 - DNA, 158 bp, synthetic construct
  misc_feature 1..158: note = Synthetic nucleic acid
  source 1..158: mol_type = other DNA
cagacgacggccagtgtcgacatgttctcaccgcagtcacgcttgcgtcatgcagttaacacttcttgcggcgatggttcctggctcttcgatcgccgactgtttaaagtcagccgttaccagcaggtaaaagccagtggatcctacggtcattcagc

SEQ ID NO: 2979 - DNA, 158 bp, synthetic construct
  misc_feature 1..158: note = Synthetic nucleic acid
  source 1..158: mol_type = other DNA
cagacgacggccagtgtcgacatgaacacgatttcttccctcgaaacgactgatttaccggcaacacttcttgcggcgatggttcctggctcttcgatcgaagacgccatcatcatggcgttgccaatcagtatgttgggatcctacggtcattcagc

SEQ ID NO: 2980 - DNA, 158 bp, synthetic construct
  misc_feature 1..158: note = Synthetic nucleic acid
  source 1..158: mol_type = other DNA
cagacgacggccagtgtcgacatgacgcccggcgagcgcagcctcattcaacgaacacttcttgcggcgatggttcctggctcttcgatcgtcggtggcaaccaggttttctcctttgccgaacatggtctgcttggcggatcctacggtcattcagc

SEQ ID NO: 2981 - DNA, 158 bp, synthetic construct
  misc_feature 1..158: note = Synthetic nucleic acid
  source 1..158: mol_type = other DNA
cagacgacggccagtgtcgacatgactgataacaataccgccctaaagaaagctggcctgaaagtaacaacacttcttgcggcgatggttcctggctcttcgatccgcgaagatgaacatgcgcacgaaggcaaatgtggatcctacggtcattcagc

SEQ ID NO: 2982 - DNA, 158 bp, synthetic construct
  misc_feature 1..158: note = Synthetic nucleic acid
  source 1..158: mol_type = other DNA
cagacgacggccagtgtcgacatgcgtaccgttttgaacattctgaactttgtgcttggcggatttaacacttcttgcggcgatggttcctggctcttcgatccgcgtgaagccaatgcacgtcgtcgttttgaacctggatcctacggtcattcagc

SEQ ID NO: 2983 - DNA, 158 bp, synthetic construct
  misc_feature 1..158: note = Synthetic nucleic acid
  source 1..158: mol_type = other DNA
cagacgacggccagtgtcgacatggcagctcttactgcaagctgtattgacctgaatattcaggaacacttcttgcggcgatggttcctggctcttcgatcggtgcttgccttgttaaatcaaaccctcagctcaggcggatcctacggtcattcagc

SEQ ID NO: 2984 - DNA, 158 bp, synthetic construct
  misc_feature 1..158: note = Synthetic nucleic acid
  source 1..158: mol_type = other DNA
cagacgacggccagtgtcgacatggcccaactaaaatttaactcaatcctggtggtttgtaccggcaacatttaacacttcttgcggcgatggttcctggctcttcgatcggaatgggcgaagcgcctcagccggagcggatcctacggtcattcagc

SEQ ID NO: 2985 - DNA, 158 bp, synthetic construct
  misc_feature 1..158: note = Synthetic nucleic acid
  source 1..158: mol_type = other DNA
cagacgacggccagtgtcgacatgtttgatgtcactttgctgatcctgctcgggttagctgcgctaacacttcttgcggcgatggttcctggctcttcgatcgcgggtctggtttcgctgattgtggggaaacagctgggatcctacggtcattcagc

SEQ ID NO: 2986 - DNA, 158 bp, synthetic construct
  misc_feature 1..158: note = Synthetic nucleic acid
  source 1..158: mol_type = other DNA
cagacgacggccagtgtcgacatgaaaaacgcgacgttctaccttctggacaatgacaccacaacacttcttgcggcgatggttcctggctcttcgatcgtggctggtttcaacctgaatacggcaacctggaaatcgggatcctacggtcattcagc

SEQ ID NO: 2987 - DNA, 158 bp, synthetic construct
  misc_feature 1..158: note = Synthetic nucleic acid
  source 1..158: mol_type = other DNA
cagacgacggccagtgtcgacatgaaacgtaaaacactacctctgctggcgctggttgccaaacacttcttgcggcgatggttcctggctcttcgatcacggctgctgataccgtcaaaccctgataaccgggaattgggatcctacggtcattcagc

SEQ ID NO: 2988 - DNA, 158 bp, synthetic construct
  misc_feature 1..158: note = Synthetic nucleic acid
  source 1..158: mol_type = other DNA
cagacgacggccagtgtcgacatgaaacgtaaaacactgcctctgctggcgctggttgcaacacttcttgcggcgatggttcctggctcttcgatcgggcagctactgataccctcgaaccctgacaatcaggaacccggatcctacggtcattcagc

SEQ ID NO: 2989 - DNA, 158 bp, synthetic construct
  misc_feature 1..158: note = Synthetic nucleic acid
  source 1..158: mol_type = other DNA
cagacgacggccagtgtcgacatgacaaacccgcaattcgccggacatccgttcggcacaaaacacttcttgcggcgatggttcctggctcttcgatcgttaagcgaggcgattatcgctgcgacgaagcaggttacgggatcctacggtcattcagc

SEQ ID NO: 2990 - DNA, 158 bp, synthetic construct
  misc_feature 1..158: note = Synthetic nucleic acid
  source 1..158: mol_type = other DNA
cagacgacggccagtgtcgacatgagtatgtcaacatccactgaagtcatcgctcatcactgggaacacttcttgcggcgatggttcctggctcttcgatccccggaaacgaacagtatcgctaatcgtcaacgcaaaggatcctacggtcattcagc

SEQ ID NO: 2991 - DNA, 158 bp, synthetic construct
  misc_feature 1..158: note = Synthetic nucleic acid
  source 1..158: mol_type = other DNA
cagacgacggccagtgtcgacatgccgttaagtccctacctctcttttgccggtaactgttaacacttcttgcggcgatggttcctggctcttcgatcgtggatgattaatgtcgtcaaacaacaaccaacgcaacccggatcctacggtcattcagc

SEQ ID NO: 2992 - DNA, 158 bp, synthetic construct
  misc_feature 1..158: note = Synthetic nucleic acid
  source 1..158: mol_type = other DNA
cagacgacggccagtgtcgacatgcggcttagtgattattttccagaatcatcaatctcagttatacattcagcaaaaaacacttcttgcggcgatggttcctggctcttcgatccggacattatcagccgcggagctggatcctacggtcattcagc

SEQ ID NO: 2993 - DNA, 158 bp, synthetic construct
  misc_feature 1..158: note = Synthetic nucleic acid
  source 1..158: mol_type = other DNA
cagacgacggccagtgtcgacatggaaacactcatcgccatcagccgttggctggcaaaacaacatgttaacacttcttgcggcgatggttcctggctcttcgatcggctacgcgactcaggcaccgagcaggcgggatcctacggtcattcagccgc

SEQ ID NO: 2994 - DNA, 158 bp, synthetic construct
  misc_feature 1..158: note = Synthetic nucleic acid
  source 1..158: mol_type = other DNA
cagacgacggccagtgtcgacatggcagaacatggtgcgctggcgaccctgaaagatctggcagaaaaaaacacttcttgcggcgatggttcctggctcttcgatccccagcgcgccgccatgaggaaacctgaaagcggatcctacggtcattcagc

SEQ ID NO: 2995 - DNA, 158 bp, synthetic construct
  misc_feature 1..158: note = Synthetic nucleic acid
  source 1..158: mol_type = other DNA
cagacgacggccagtgtcgacatggcagatatcactcttatcagcggcagcaccctcaacacttcttgcggcgatggttcctggctcttcgatccggcagaagaatggctgggatcgtgggttaatttactcaaactgggatcctacggtcattcagc

SEQ ID NO: 2996 - DNA, 158 bp, synthetic construct
  misc_feature 1..158: note = Synthetic nucleic acid
  source 1..158: mol_type = other DNA
cagacgacggccagtgtcgacatggttattagtattcgccgctcacggcatgaggaaggggaggaaaacacttcttgcggcgatggttcctggctcttcgatcatccgttgctgaatctggcgtatgtgggggcgaggggatcctacggtcattcagc

SEQ ID NO: 2997 - DNA, 158 bp, synthetic construct
  misc_feature 1..158: note = Synthetic nucleic acid
  source 1..158: mol_type = other DNA
cagacgacggccagtgtcgacatgtttaacaacatcttagttgtctgtgtcggcaatatttgccgttcccaacacttcttgcggcgatggttcctggctcttcgatcggcgcaggcattgaacgcagagcaggtactcggatcctacggtcattcagc

SEQ ID NO: 2998 - DNA, 158 bp, synthetic construct
  misc_feature 1..158: note = Synthetic nucleic acid
  source 1..158: mol_type = other DNA
cagacgacggccagtgtcgacatgaaacgacttctgattcttacggcactcctgccgtttgtcaacacttcttgcggcgatggttcctggctcttcgatccgcagcctgacattccgttgaaaactattgggccggccggatcctacggtcattcagc

SEQ ID NO: 2999 - DNA, 158 bp, synthetic construct
  misc_feature 1..158: note = Synthetic nucleic acid
  source 1..158: mol_type = other DNA
cagacgacggccagtgtcgacatgaacatgttctttgactggtggttcgccacatcaccccgcaacacttcttgcggcgatggttcctggctcttcgatctgttcacgctacaactggagacgccgcatgagggtcaaggatcctacggtcattcagc

SEQ ID NO: 3000 - DNA, 158 bp, synthetic construct
  misc_feature 1..158: note = Synthetic nucleic acid
  source 1..158: mol_type = other DNA
cagacgacggccagtgtcgacatgaattacatatattccgcgactacaaactctttctatcccttggagatgaaagaaacacttcttgcggcgatggttcctggctcttcgatccctccggcagttcaggccagagaaggatcctacggtcattcagc

SEQ ID NO: 3001 - DNA, 158 bp, synthetic construct
  misc_feature 1..158: note = Synthetic nucleic acid
  source 1..158: mol_type = other DNA
cagacgacggccagtgtcgacatgaccaccacaacgccacaacgtattggaggctggttgcttaacacttcttgcggcgatggttcctggctcttcgatcgctcgtcgcgggtaaaagcgacgtttgtgaatccgcccggatcctacggtcattcagc

SEQ ID NO: 3002 - DNA, 158 bp, synthetic construct
  misc_feature 1..158: note = Synthetic nucleic acid
  source 1..158: mol_type = other DNA
cagacgacggccagtgtcgacatgattcgggaagcgcaacgttcagaactccccgcgataacacttcttgcggcgatggttcctggctcttcgatccccacatggattatgagctggccggtggttcaaacgctgcacggatcctacggtcattcagc

SEQ ID NO: 3003 - DNA, 158 bp, synthetic construct
  misc_feature 1..158: note = Synthetic nucleic acid
  source 1..158: mol_type = other DNA
cagacgacggccagtgtcgacatggacaagcaacgcggttttacacttatcgaactgatggtggttattaacacttcttgcggcgatggttcctggctcttcgatcaagatgtcttccgctttgatgacgccaaccatggatcctacggtcattcagc

SEQ ID NO: 3004 - DNA, 158 bp, synthetic construct
  misc_feature 1..158: note = Synthetic nucleic acid
  source 1..158: mol_type = other DNA
cagacgacggccagtgtcgacatggcaaccccagcaactgtatccatagaacccaaacacttcttgcggcgatggttcctggctcttcgatctaaagctttctttgccaatatctcaatcactgaggtggcaaaactaggatcctacggtcattcagc

SEQ ID NO: 3005 - DNA, 158 bp, synthetic construct
  misc_feature 1..158: note = Synthetic nucleic acid
  source 1..158: mol_type = other DNA
cagacgacggccagtgtcgacatgttaggttgggtaattacctgtcacgatgaccgggcaacacttcttgcggcgatggttcctggctcttcgatcaatccgcctttcgtcctcaaacataatttgtatgagtatttaggatcctacggtcattcagc

SEQ ID NO: 3006 - DNA, 158 bp, synthetic construct
  misc_feature 1..158: note = Synthetic nucleic acid
  source 1..158: mol_type = other DNA
cagacgacggccagtgtcgacatgattgcattaattcaacgcgtaacccgtgccagcgtcaaacacttcttgcggcgatggttcctggctcttcgatcggtcaatgatggccccgtgacattctggttgcaggtatcgggatcctacggtcattcagc

SEQ ID NO: 3007 - DNA, 158 bp, synthetic construct
  misc_feature 1..158: note = Synthetic nucleic acid
  source 1..158: mol_type = other DNA
cagacgacggccagtgtcgacatgcgcgcaacggataagcaacgcggttttacattaaacacttcttgcggcgatggttcctggctcttcgatcaggacgacatcaccaactggggtttgagcaagaagaaaaagcgtggatcctacggtcattcagc

SEQ ID NO: 3008 - DNA, 158 bp, synthetic construct
  misc_feature 1..158: note = Synthetic nucleic acid
  source 1..158: mol_type = other DNA
cagacgacggccagtgtcgacatggacaacaaaatatcaacctattcaccggcctttagtattgtgtcatgaacacttcttgcggcgatggttcctggctcttcgatccaggttacccaggaagaatacagcgaagttggatcctacggtcattcagc

SEQ ID NO: 3009 - DNA, 158 bp, synthetic construct
  misc_feature 1..158: note = Synthetic nucleic acid
  source 1..158: mol_type = other DNA
cagacgacggccagtgtcgacatgaacagaacgattcttgtccctatcgatatttccgattcagaattaactcaacaacacttcttgcggcgatggttcctggctcttcgatcgtgctccgtgctggttgtgcgccccggatcctacggtcattcagc

SEQ ID NO: 3010 - DNA, 158 bp, synthetic construct
  misc_feature 1..158: note = Synthetic nucleic acid
  source 1..158: mol_type = other DNA
cagacgacggccagtgtcgacatgcctgcttgtgagcttcgcccggccacgcagtacgaaacacttcttgcggcgatggttcctggctcttcgatcggctacgagcagagccacttccgcttcaccaaggcgctgcacggatcctacggtcattcagc

SEQ ID NO: 3011 - DNA, 158 bp, synthetic construct
  misc_feature 1..158: note = Synthetic nucleic acid
  source 1..158: mol_type = other DNA
cagacgacggccagtgtcgacatgcgtttaaatactctgtctccggccgaaggctccaaaaagaacacttcttgcggcgatggttcctggctcttcgatcctgctatcgaagctgctggcggtaaaatcgaggaacggggatcctacggtcattcagc

SEQ ID NO: 3012 - DNA, 158 bp, synthetic construct
  misc_feature 1..158: note = Synthetic nucleic acid
  source 1..158: mol_type = other DNA
cagacgacggccagtgtcgacgtgaaaagtaccagcgatctgttcaatgaaattattccattgggtcgaacacttcttgcggcgatggttcctggctcttcgatccttgagtatttgcttaagaaagtcctgccgggcggatcctacggtcattcagc

SEQ ID NO: 3013 - DNA, 158 bp, synthetic construct
  misc_feature 1..158: note = Synthetic nucleic acid
  source 1..158: mol_type = other DNA
cagacgacggccagtgtcgacttggaatcgccactaggttctgatctggcacggttaacacttcttgcggcgatggttcctggctcttcgatcgcaaaacttgagcataatatcattgagttacaggccaaagggaagggatcctacggtcattcagc

SEQ ID NO: 3014 - DNA, 158 bp, synthetic construct
  misc_feature 1..158: note = Synthetic nucleic acid
  source 1..158: mol_type = other DNA
cagacgacggccagtgtcgacatgacaatccataagaaaggtcaggcacactgggaaggaacacttcttgcggcgatggttcctggctcttcgatcctgaaagcggaaattacgctggattaccagttgaaatcgaccggatcctacggtcattcagc

SEQ ID NO: 3015 - DNA, 158 bp, synthetic construct
  misc_feature 1..158: note = Synthetic nucleic acid
  source 1..158: mol_type = other DNA
cagacgacggccagtgtcgacatgattaacgatattaaatgggtacaggcacaacgtaaagccaccgaaacacttcttgcggcgatggttcctggctcttcgatcgacgatgcactgtttgcgctggtatcaggtggatcctacggtcattcagccgc

SEQ ID NO: 3016 - DNA, 158 bp, synthetic construct
  misc_feature 1..158: note = Synthetic nucleic acid
  source 1..158: mol_type = other DNA
cagacgacggccagtgtcgacatgcaagaaattatgcaatttgttggccgtcatcccatactgagtatcgaacacttcttgcggcgatggttcctggctcttcgatccgaaaacttgcctttggtgcgcggcaaacccggatcctacggtcattcagc

SEQ ID NO: 3017 - DNA, 158 bp, synthetic construct
  misc_feature 1..158: note = Synthetic nucleic acid
  source 1..158: mol_type = other DNA
cagacgacggccagtgtcgacatggctattgaacgtactttttccatcatcaaaccgaacgcggtagcaaaaaacgtaacacttcttgcggcgatggttcctggctcttcgatcgaagtgtgcccgcgcacccgttccggatcctacggtcattcagc

SEQ ID NO: 3018 - DNA, 158 bp, synthetic construct
  misc_feature 1..158: note = Synthetic nucleic acid
  source 1..158: mol_type = other DNA
cagacgacggccagtgtcgacatgaaaacttttacagctaaaccagaaaccgtaaaacgcgactggtataacacttcttgcggcgatggttcctggctcttcgatccggcacagcaaccgcaagttcttgacatcccaggatcctacggtcattcagc

SEQ ID NO: 3019 - DNA, 158 bp, synthetic construct
  misc_feature 1..158: note = Synthetic nucleic acid
  source 1..158: mol_type = other DNA
cagacgacggccagtgtcgacatgagctatagcaatattcttgtcgctgttgcggttacaccaacacttcttgcggcgatggttcctggctcttcgatcgaggtcgatgtgctgttagttccacttacgggagattggggatcctacggtcattcagc

SEQ ID NO: 3020 - DNA, 158 bp, synthetic construct
  misc_feature 1..158: note = Synthetic nucleic acid
  source 1..158: mol_type = other DNA
cagacgacggccagtgtcgacatgcgtaacttcgatttatccccactgatgcgtcaatggatcaacacttcttgcggcgatggttcctggctcttcgatcgtatcgctatcagcgaacgtcccgcgttaaatagcagtggatcctacggtcattcagc

SEQ ID NO: 3021 - DNA, 158 bp, synthetic construct
  misc_feature 1..158: note = Synthetic nucleic acid
  source 1..158: mol_type = other DNA
cagacgacggccagtgtcgacatggccagagcgcgtggacgaggtcgtcgcgataacacttcttgcggcgatggttcctggctcttcgatcatagtgcgggtgtgaaatcggttggtttaatgacgcagcctatctcaggatcctacggtcattcagc

SEQ ID NO: 3022 - DNA, 158 bp, synthetic construct
  misc_feature 1..158: note = Synthetic nucleic acid
  source 1..158: mol_type = other DNA
cagacgacggccagtgtcgacatggctaagaaagtacaagcctatgtcaagctgcaggttgcagctaacacttcttgcggcgatggttcctggctcttcgatcctgcacgttccatgggcctggtagtggaggacatcggatcctacggtcattcagc

SEQ ID NO: 3023 - DNA, 158 bp, synthetic construct
  misc_feature 1..158: note = Synthetic nucleic acid
  source 1..158: mol_type = other DNA
cagacgacggccagtgtcgacatggcttataaacacattggcgtggcaatttccgggaataacacttcttgcggcgatggttcctggctcttcgatctgagtgcggatttgctcatcgtgccgtttatcgataagtcgggatcctacggtcattcagc

SEQ ID NO: 3024 - DNA, 158 bp, synthetic construct
  misc_feature 1..158: note = Synthetic nucleic acid
  source 1..158: mol_type = other DNA
cagacgacggccagtgtcgacatgtataagacaatcattatgccagttgatgtatttgaaatggaattgagcgacaaagctaacacttcttgcggcgatggttcctggctcttcgatccggtgctggttgtgcgtggaggatcctacggtcattcagc

SEQ ID NO: 3025 - DNA, 158 bp, synthetic construct
  misc_feature 1..158: note = Synthetic nucleic acid
  source 1..158: mol_type = other DNA
cagacgacggccagtgtcgacgtgagtgaagcgttatcgcttttctcgttgtttgccagtagttttctcaaacacttcttgcggcgatggttcctggctcttcgatcgaccgttcagggcatgatgtggtggcacttgggatcctacggtcattcagc

SEQ ID NO: 3026 - DNA, 158 bp, synthetic construct
  misc_feature 1..158: note = Synthetic nucleic acid
  source 1..158: mol_type = other DNA
cagacgacggccagtgtcgacatgaaacggaacacgaaaattgccctggtaatgatggcgctttcaaacacttcttgcggcgatggttcctggctcttcgatcgtggtggcggtcatatgggtatgggccactggaagggatcctacggtcattcagc

SEQ ID NO: 3027 - DNA, 158 bp, synthetic construct
  misc_feature 1..158: note = Synthetic nucleic acid
  source 1..158: mol_type = other DNA
cagacgacggccagtgtcgacatgagcaacattaccatttatcacaacccggcctgcggcaaacacttcttgcggcgatggttcctggctcttcgatccgagaaagtggttgatgaagcgggtaagcgcctgaaaacgggatcctacggtcattcagc

SEQ ID NO: 3028 - DNA, 158 bp, synthetic construct
  misc_feature 1..158: note = Synthetic nucleic acid
  source 1..158: mol_type = other DNA
cagacgacggccagtgtcgacatggagatacgcgtatttcgccaggaagatttcgaagagaacacttcttgcggcgatggttcctggctcttcgatctgagtctgggtaagcgtttgattgaagatgaagagtacctaggatcctacggtcattcagc

SEQ ID NO: 3029 - DNA, 158 bp, synthetic construct
  misc_feature 1..158: note = Synthetic nucleic acid
  source 1..158: mol_type = other DNA
cagacgacggccagtgtcgacatggcaatgcatcttaacgaaaacctcgacgataacggcgaaatgcataacacttcttgcggcgatggttcctggctcttcgatctggtcggcgaagaaaccgccaaagcgaagtcaggatcctacggtcattcagc

SEQ ID NO: 3030 - DNA, 158 bp, synthetic construct
  misc_feature 1..158: note = Synthetic nucleic acid
  source 1..158: mol_type = other DNA
cagacgacggccagtgtcgacatgtatcgcattggtgagctggcaaaaatggcggaagtaacaaacacttcttgcggcgatggttcctggctcttcgatcttgaacaaggggcgagtggcgttaagagtggttgtagtggatcctacggtcattcagc

SEQ ID NO: 3031 - DNA, 158 bp, synthetic construct
  misc_feature 1..158: note = Synthetic nucleic acid
  source 1..158: mol_type = other DNA
cagacgacggccagtgtcgacgtgcagttaacgagtttcactgattacggattacgtgcgaacacttcttgcggcgatggttcctggctcttcgatcaagagaatcaaccgctttataaattattgctggtggagacaggatcctacggtcattcagc

SEQ ID NO: 3032 - DNA, 158 bp, synthetic construct
  misc_feature 1..158: note = Synthetic nucleic acid
  source 1..158: mol_type = other DNA
cagacgacggccagtgtcgacgtgcgacaacggactattgtatgccctttgattcaaaatgatggtaacacttcttgcggcgatggttcctggctcttcgatccccgaaaaacgttacgtttgaaaggtcttctgttgggatcctacggtcattcagc

SEQ ID NO: 3033 - DNA, 158 bp, synthetic construct
  misc_feature 1..158: note = Synthetic nucleic acid
  source 1..158: mol_type = other DNA
cagacgacggccagtgtcgacatgaaaatcaagcatgagcacatcgaatcagtgttgtttgccctaaacacttcttgcggcgatggttcctggctcttcgatcgcggttcttccgacgattctgtcattgttcatgctggatcctacggtcattcagc

SEQ ID NO: 3034 - DNA, 158 bp, synthetic construct
  misc_feature 1..158: note = Synthetic nucleic acid
  source 1..158: mol_type = other DNA
cagacgacggccagtgtcgacatgaagaaagtagccgcgtttgttgcgctaagcctaacacttcttgcggcgatggttcctggctcttcgatcgcaaaacagacattaacttataagctggcggatttaatgaatgcaggatcctacggtcattcagc

SEQ ID NO: 3035 - DNA, 158 bp, synthetic construct
  misc_feature 1..158: note = Synthetic nucleic acid
  source 1..158: mol_type = other DNA
cagacgacggccagtgtcgacatgaagcgttacacacctgactttcctgaaatgatgcgcctaacacttcttgcggcgatggttcctggctcttcgatctgtttagcacatggagcgatggcgattccggtttatgcaggatcctacggtcattcagc

SEQ ID NO: 3036 - DNA, 158 bp, synthetic construct
  misc_feature 1..158: note = Synthetic nucleic acid
  source 1..158: mol_type = other DNA
cagacgacggccagtgtcgacatgagtcataaggcctggcaaaatgcccatgcaatgtatgagaacgataacacttcttgcggcgatggttcctggctcttcgatcgcatcggcggcaccattacaggagaagccgacggatcctacggtcattcagc

SEQ ID NO: 3037 - DNA, 158 bp, synthetic construct
  misc_feature 1..158: note = Synthetic nucleic acid
  source 1..158: mol_type = other DNA
cagacgacggccagtgtcgacatgattgtgatttcccgacatgttgctattcccgatggtgagcttgagatcaaacacttcttgcggcgatggttcctggctcttcgatccggcaaagtgcgcagcggtcgggaagtaggatcctacggtcattcagc

SEQ ID NO: 3038 - DNA, 158 bp, synthetic construct
  misc_feature 1..158: note = Synthetic nucleic acid
  source 1..158: mol_type = other DNA
cagacgacggccagtgtcgacatgaaaaaaggcaccgttcttaattctgatatttcatcggtgatctcccaacacttcttgcggcgatggttcctggctcttcgatctatcattctctgtgctggcgtgacgttcgtgggatcctacggtcattcagc

SEQ ID NO: 3039 - DNA, 158 bp, synthetic construct
  misc_feature 1..158: note = Synthetic nucleic acid
  source 1..158: mol_type = other DNA
cagacgacggccagtgtcgacatgaataccgtttgtacccattgtcaggccatcaatcgcattccaacacttcttgcggcgatggttcctggctcttcgatcgcgccgttcgatagctggctgaacgaatctctttctggatcctacggtcattcagc

SEQ ID NO: 3040 - DNA, 158 bp, synthetic construct
  misc_feature 1..158: note = Synthetic nucleic acid
  source 1..158: mol_type = other DNA
cagacgacggccagtgtcgacatggcaatgacttaccacctggacgtcgtcagcgcagaaacacttcttgcggcgatggttcctggctcttcgatcgcgcagctgcgcgttatcgagttgaccaaaaaagcgatgtcaggatcctacggtcattcagc

SEQ ID NO: 3041 - DNA, 158 bp, synthetic construct
  misc_feature 1..158: note = Synthetic nucleic acid
  source 1..158: mol_type = other DNA
cagacgacggccagtgtcgacatgttgtttatcaagcctgcggatctccgcgaaattgtgacttttcaacacttcttgcggcgatggttcctggctcttcgatctgtggtgatccacgtcgttaaggcgatgcgcattggatcctacggtcattcagc

SEQ ID NO: 3042 - DNA, 158 bp, synthetic construct
  misc_feature 1..158: note = Synthetic nucleic acid
  source 1..158: mol_type = other DNA
cagacgacggccagtgtcgacatgtttgaattctatatcgccgcgcgtgagcagaaaaacacttcttgcggcgatggttcctggctcttcgatctaagagagcgtgtcaaaaatgcactgaacgaacttgagagatggggatcctacggtcattcagc

SEQ ID NO: 3043 - DNA, 158 bp, synthetic construct
  misc_feature 1..158: note = Synthetic nucleic acid
  source 1..158: mol_type = other DNA
cagacgacggccagtgtcgacgtgaaacctgctgctcgtcgccgcgctcgtgaaacacttcttgcggcgatggttcctggctcttcgatcggcgtactcgataaagcagcacctgtgattcgccctaacaaaaagccaggatcctacggtcattcagc

SEQ ID NO: 3044 - DNA, 158 bp, synthetic construct
  misc_feature 1..158: note = Synthetic nucleic acid
  source 1..158: mol_type = other DNA
cagacgacggccagtgtcgacatgacacgtcttgcagagatcctcgaccagatgtccgctaacacttcttgcggcgatggttcctggctcttcgatccctcaacaacccatcgcggcggtaaaaagatttcgatcgcgggatcctacggtcattcagc

SEQ ID NO: 3045 - DNA, 158 bp, synthetic construct
  misc_feature 1..158: note = Synthetic nucleic acid
  source 1..158: mol_type = other DNA
cagacgacggccagtgtcgacatgagtggaaccttactcgccttcgacttcggcaaacacttcttgcggcgatggttcctggctcttcgatcctctgcggttattattctcgaaagctatttcgagcagggatatttcggatcctacggtcattcagc

SEQ ID NO: 3046 - DNA, 158 bp, synthetic construct
  misc_feature 1..158: note = Synthetic nucleic acid
  source 1..158: mol_type = other DNA
cagacgacggccagtgtcgacatgattgcgattgccgacatcttgcaagcaggagaaaagctaaaacacttcttgcggcgatggttcctggctcttcgatcgcgattcggcatttctcccgccttgtttattgatctgggatcctacggtcattcagc

SEQ ID NO: 3047 - DNA, 158 bp, synthetic construct
  misc_feature 1..158: note = Synthetic nucleic acid
  source 1..158: mol_type = other DNA
cagacgacggccagtgtcgacatgcgtgtcaaacatgcagtagttctactcatgcttatttcgcaacacttcttgcggcgatggttcctggctcttcgatcggtttcgggtttacaaaataactcaaccgattttctaggatcctacggtcattcagc

SEQ ID NO: 3048 - DNA, 158 bp, synthetic construct
  misc_feature 1..158: note = Synthetic nucleic acid
  source 1..158: mol_type = other DNA
cagacgacggccagtgtcgacatgcgttatcccgtcactcttacacccgcgccggaagaacacttcttgcggcgatggttcctggctcttcgatcggcaaaggcgcttggcaaagagttatcgctggtgatggtttgtggatcctacggtcattcagc

SEQ ID NO: 3049 - DNA, 158 bp, synthetic construct
  misc_feature 1..158: note = Synthetic nucleic acid
  source 1..158: mol_type = other DNA
cagacgacggccagtgtcgacatgctcgataagctcgacgccgccttacgttttcaaaacacttcttgcggcgatggttcctggctcttcgatcggcaaatcaaaggcatgatgaacgttttacagagcggaaattatggatcctacggtcattcagc

SEQ ID NO: 3050 - DNA, 158 bp, synthetic construct
  misc_feature 1..158: note = Synthetic nucleic acid
  source 1..158: mol_type = other DNA
cagacgacggccagtgtcgacatggaaggcgaactgatagaaaacaatgggttagacatttatgacaccaaacacttcttgcggcgatggttcctggctcttcgatcacattcaccatttggagatgacaaacaacctggatcctacggtcattcagc

SEQ ID NO: 3051 - DNA, 158 bp, synthetic construct
  misc_feature 1..158: note = Synthetic nucleic acid
  source 1..158: mol_type = other DNA
cagacgacggccagtgtcgacatggcaaacccggaacaactggaagaacagcgtgaaaacacttcttgcggcgatggttcctggctcttcgatcatgaagattttgtcgatgaagacgatgacggagttcgccaccccggatcctacggtcattcagc

SEQ ID NO: 3052 - DNA, 158 bp, synthetic construct
  misc_feature 1..158: note = Synthetic nucleic acid
  source 1..158: mol_type = other DNA
cagacgacggccagtgtcgacatggctttattgccggataaagaaaagttgctgcgtaattttttacgctaacacttcttgcggcgatggttcctggctcttcgatcaattcgcgccaaagccgctgcacttagcggatcctacggtcattcagccgc

SEQ ID NO: 3053 - DNA, 158 bp, synthetic construct
  misc_feature 1..158: note = Synthetic nucleic acid
  source 1..158: mol_type = other DNA
cagacgacggccagtgtcgacatgtggtatcaaaagacgctcacgcttagcgccaaatctcgtggaacacttcttgcggcgatggttcctggctcttcgatctcgcgtcgcatcatcgcgacactacaaggggagattggatcctacggtcattcagc

SEQ ID NO: 3054 - DNA, 158 bp, synthetic construct
  misc_feature 1..158: note = Synthetic nucleic acid
  source 1..158: mol_type = other DNA
cagacgacggccagtgtcgacatgaaaaaactcgcaattgcaggcgcgctcttgttgctggcggaacacttcttgcggcgatggttcctggctcttcgatcgctggataaagcgccgttaccgacgccactgccgtcaggatcctacggtcattcagc

SEQ ID NO: 3055 - DNA, 158 bp, synthetic construct
  misc_feature 1..158: note = Synthetic nucleic acid
  source 1..158: mol_type = other DNA
cagacgacggccagtgtcgacatgaaaatatactgttgcttaaataccgttggtttttttatggatggctgtggcaacacttcttgcggcgatggttcctggctcttcgatccgcctccggcagttcaggccagaagaggatcctacggtcattcagc

SEQ ID NO: 3056 - DNA, 158 bp, synthetic construct
  misc_feature 1..158: note = Synthetic nucleic acid
  source 1..158: mol_type = other DNA
cagacgacggccagtgtcgacatgaaagaaaccgatattgcaggcattttaacgtccactcacaccattgcaacacttcttgcggcgatggttcctggctcttcgatcgagatccctcgcctgggcctggccaaaggaggatcctacggtcattcagc

SEQ ID NO: 3057 - DNA, 158 bp, synthetic construct
  misc_feature 1..158: note = Synthetic nucleic acid
  source 1..158: mol_type = other DNA
cagacgacggccagtgtcgacatgaacaatttaattattacgacccgacaatcaccagtacgtttactggttgattataacacttcttgcggcgatggttcctggctcttcgatcaaaaagcgctagtccgggcagccggatcctacggtcattcagc

SEQ ID NO: 3058 - DNA, 158 bp, synthetic construct
  misc_feature 1..158: note = Synthetic nucleic acid
  source 1..158: mol_type = other DNA
cagacgacggccagtgtcgacatgacatcccgacgagactggcagttacagcaaaacacttcttgcggcgatggttcctggctcttcgatcaacaaatttgcacatatgaacacgatttcttccctcgaaacgacgcgggatcctacggtcattcagc

SEQ ID NO: 3059 - DNA, 158 bp, synthetic construct
  misc_feature 1..158: note = Synthetic nucleic acid
  source 1..158: mol_type = other DNA
cagacgacggccagtgtcgacatgactgaagagtgcggggaaattgttttctggacgctgcaacacttcttgcggcgatggttcctggctcttcgatcggaaccggccatctatctgatggccagaaaaattgcggtcggatcctacggtcattcagc

SEQ ID NO: 3060 - DNA, 158 bp, synthetic construct
  misc_feature 1..158: note = Synthetic nucleic acid
  source 1..158: mol_type = other DNA
cagacgacggccagtgtcgacatgagcgaagcacttaaaattctgaacaacatccgtactcttcgtaacacttcttgcggcgatggttcctggctcttcgatcgtaaatccctcgacgatttcctgatcaagcaattaggatcctacggtcattcagc

SEQ ID NO: 3061 - DNA, 158 bp, synthetic construct
  misc_feature 1..158: note = Synthetic nucleic acid
  source 1..158: mol_type = other DNA
cagacgacggccagtgtcgacatgagtgacatgaataatccggccgatgacaacaacggcgcaatggacgataacacttcttgcggcgatggttcctggctcttcgatcctgagcgaatgcgccgcctgagccgttcaggatcctacggtcattcagc

SEQ ID NO: 3062 - DNA, 158 bp, synthetic construct
  misc_feature 1..158: note = Synthetic nucleic acid
  source 1..158: mol_type = other DNA
cagacgacggccagtgtcgacatgatctggaaacgccatttaacgctcgacgaactgaacgccaaacacttcttgcggcgatggttcctggctcttcgatcctgcacttgtcggctgggtacggcagttttgggaataggatcctacggtcattcagc

SEQ ID NO: 3063 - DNA, 158 bp, synthetic construct
  misc_feature 1..158: note = Synthetic nucleic acid
  source 1..158: mol_type = other DNA
cagacgacggccagtgtcgacatgcgtaactttgatttatccccgctttaccgttctgctattggatttaacacttcttgcggcgatggttcctggctcttcgatccgaaaaaaccgcgccgtatcgaaatcaacctcggatcctacggtcattcagc

SEQ ID NO: 3064 - DNA, 158 bp, synthetic construct
  misc_feature 1..158: note = Synthetic nucleic acid
  source 1..158: mol_type = other DNA
cagacgacggccagtgtcgacatggctaataaaccttcggcagaagaactgaaaaaaaatttgtccgaaacacttcttgcggcgatggttcctggctcttcgatcgatggcgaaaacggcgaagaaatcaacggtcatggatcctacggtcattcagc

SEQ ID NO: 3065 - DNA, 158 bp, synthetic construct
  misc_feature 1..158: note = Synthetic nucleic acid
  source 1..158: mol_type = other DNA
cagacgacggccagtgtcgacatgttaaagcgttatttagtactctcggtagcaacggcagcattttaacacttcttgcggcgatggttcctggctcttcgatcccaatatgggtattcaacctatcgtggcagtaaaggatcctacggtcattcagc

SEQ ID NO: 3066 - DNA, 158 bp, synthetic construct
  misc_feature 1..158: note = Synthetic nucleic acid
  source 1..158: mol_type = other DNA
cagacgacggccagtgtcgacatgaagtggcaacaacgtgttcgtgtcgcaacggaacacttcttgcggcgatggttcctggctcttcgatctaagaagttacatcaccttacgtctaaacatcgcgtacgccgcttaggatcctacggtcattcagc

SEQ ID NO: 3067 - DNA, 158 bp, synthetic construct
  misc_feature 1..158: note = Synthetic nucleic acid
  source 1..158: mol_type = other DNA
cagacgacggccagtgtcgacatgacgtcactctctcgtccgcgcgtggagtttatctccaaacacttcttgcggcgatggttcctggctcttcgatccctgtggctgtgtaattcgaaacggctgaagcgggaggttggatcctacggtcattcagc

SEQ ID NO: 3068 - DNA, 158 bp, synthetic construct
  misc_feature 1..158: note = Synthetic nucleic acid
  source 1..158: mol_type = other DNA
cagacgacggccagtgtcgacatgagcattattaaagaatttcgcgaatttgcgatgcgcggaacacttcttgcggcgatggttcctggctcttcgatcattcgtgatttgctgaaagagcagaataaccgctctcggggatcctacggtcattcagc

SEQ ID NO: 3069 - DNA, 158 bp, synthetic construct
  misc_feature 1..158: note = Synthetic nucleic acid
  source 1..158: mol_type = other DNA
cagacgacggccagtgtcgacatgagccagctcgtctacttctccagcagctccgaaaaaacacttcttgcggcgatggttcctggctcttcgatcggagtaaccgaattttggcaacgacaaccgcagaatgcccggggatcctacggtcattcagc

SEQ ID NO: 3070 - DNA, 158 bp, synthetic construct
  misc_feature 1..158: note = Synthetic nucleic acid
  source 1..158: mol_type = other DNA
cagacgacggccagtgtcgacatgagtgaaaaggtggtgttcagtcaactgagccgtaaatttattgataacacttcttgcggcgatggttcctggctcttcgatctctatttgatggtgaggagactgcgtgaccttggatcctacggtcattcagc

SEQ ID NO: 3071 - DNA, 158 bp, synthetic construct
  misc_feature 1..158: note = Synthetic nucleic acid
  source 1..158: mol_type = other DNA
cagacgacggccagtgtcgacatgatatggaaacggaaaatcaccctggaagcactgaatgctatgaacacttcttgcggcgatggttcctggctcttcgatcgctgttcgtcacgattgacgaccgccattttgttgggatcctacggtcattcagc

SEQ ID NO: 3072 - DNA, 158 bp, synthetic construct
  misc_feature 1..158: note = Synthetic nucleic acid
  source 1..158: mol_type = other DNA
cagacgacggccagtgtcgacatggctcaggttgccatttttaaagaaatattcgatcaagtgcgaaaaaacacttcttgcggcgatggttcctggctcttcgatcttcagaacactacacaaatctttccacgcttcggatcctacggtcattcagc

SEQ ID NO: 3073 - DNA, 158 bp, synthetic construct
  misc_feature 1..158: note = Synthetic nucleic acid
  source 1..158: mol_type = other DNA
cagacgacggccagtgtcgacatgtacgcggcaaaaggcacccaggcctatgcaaacacttcttgcggcgatggttcctggctcttcgatcggaaagagtcgttactctccccttctttgattcaggacccagtcgctggatcctacggtcattcagc

SEQ ID NO: 3074 - DNA, 158 bp, synthetic construct
  misc_feature 1..158: note = Synthetic nucleic acid
  source 1..158: mol_type = other DNA
cagacgacggccagtgtcgacatgtccagaccaactatcatcattaacgacctggatgccgaacgcataacacttcttgcggcgatggttcctggctcttcgatccagccagaagctgctggcgactacctgctttttggatcctacggtcattcagc

SEQ ID NO: 3075 - DNA, 158 bp, synthetic construct
  misc_feature 1..158: note = Synthetic nucleic acid
  source 1..158: mol_type = other DNA
cagacgacggccagtgtcgacatgtcgataaaacaaatgccagggagggtattaatatcgctattgttgagcaacacttcttgcggcgatggttcctggctcttcgatcgtaccacctgtggaatagtcaaagcagttggatcctacggtcattcagc

SEQ ID NO: 3076 - DNA, 158 bp, synthetic construct
  misc_feature 1..158: note = Synthetic nucleic acid
  source 1..158: mol_type = other DNA
cagacgacggccagtgtcgacatgttacaaccaaagcgtacaaaattccgtaaaatgcacaaaggcaacacttcttgcggcgatggttcctggctcttcgatcttaaaaccacctttgtaactaagacggtgatgactggatcctacggtcattcagc

SEQ ID NO: 3077 - DNA, 158 bp, synthetic construct
  misc_feature 1..158: note = Synthetic nucleic acid
  source 1..158: mol_type = other DNA
cagacgacggccagtgtcgacatgaaaatgattgaagttgttgccgccatcattgaacgtgatggcaaaattttaaacacttcttgcggcgatggttcctggctcttcgatctacgcgccgccagaccagcggatcggggatcctacggtcattcagc

SEQ ID NO: 3078 - DNA, 158 bp, synthetic construct
  misc_feature 1..158: note = Synthetic nucleic acid
  source 1..158: mol_type = other DNA
cagacgacggccagtgtcgacatgaacatcagcgatgtagcaaaaattaccggcctgaccagcaaagcaacacttcttgcggcgatggttcctggctcttcgatcctctccggctgctgtcatcatcgggcagggaacggatcctacggtcattcagc

SEQ ID NO: 3079 - DNA, 158 bp, synthetic construct
  misc_feature 1..158: note = Synthetic nucleic acid
  source 1..158: mol_type = other DNA
cagacgacggccagtgtcgacatgcgtcttcttcataccatgctgcgcgttggcgatttgcaacgaacacttcttgcggcgatggttcctggctcttcgatcgaagagaaagacgccggtcgcggtctgggcaacgggggatcctacggtcattcagc

SEQ ID NO: 3080 - DNA, 158 bp, synthetic construct
  misc_feature 1..158: note = Synthetic nucleic acid
  source 1..158: mol_type = other DNA
cagacgacggccagtgtcgacatggaaacaaaaaatttaactatcggcgaacgcatcaggtatcgtaacacttcttgcggcgatggttcctggctcttcgatctactaaaagcccgtcagcggacaaataaaagaactggatcctacggtcattcagc

SEQ ID NO: 3081 - DNA, 158 bp, synthetic construct
  misc_feature 1..158: note = Synthetic nucleic acid
  source 1..158: mol_type = other DNA
cagacgacggccagtgtcgacgtgaaccgcgaaaagggtgtttcgtcactggctctaacacttcttgcggcgatggttcctggctcttcgatcgatttttgtccgctgaaagagagggcgttatgtcagcttcccattggatcctacggtcattcagc

SEQ ID NO: 3082 - DNA, 158 bp, synthetic construct
  misc_feature 1..158: note = Synthetic nucleic acid
  source 1..158: mol_type = other DNA
cagacgacggccagtgtcgacgtggtcctgtggcaatctgatttgcgcgtctcctggaacacttcttgcggcgatggttcctggctcttcgatcgggatttacggcggattttgttgcaacaagagacgcaaagactgggatcctacggtcattcagc

SEQ ID NO: 3083 - DNA, 158 bp, synthetic construct
  misc_feature 1..158: note = Synthetic nucleic acid
  source 1..158: mol_type = other DNA
cagacgacggccagtgtcgacatgaaaactaaagtcattcttagccagcaaatggcgagtgcaattattgccgaacacttcttgcggcgatggttcctggctcttcgatcagcggcagcagcggtgttggcgaaacctggatcctacggtcattcagc

SEQ ID NO: 3084 - DNA, 158 bp, synthetic construct
  misc_feature 1..158: note = Synthetic nucleic acid
  source 1..158: mol_type = other DNA
cagacgacggccagtgtcgacatgaaatccgtttttacgatttccgccagcctggcgattagcaacacttcttgcggcgatggttcctggctcttcgatccggatatggccacgctgaaaattatcggcgacgacgccggatcctacggtcattcagc

SEQ ID NO: 3085 - DNA, 158 bp, synthetic construct
  misc_feature 1..158: note = Synthetic nucleic acid
  source 1..158: mol_type = other DNA
cagacgacggccagtgtcgacatgagggttaaacgctggttgttggcaggtattgcattgtgccttttaaaacacttcttgcggcgatggttcctggctcttcgatcagccgcaaaaagtgacgctgatggtggagcaggatcctacggtcattcagc

SEQ ID NO: 3086 - DNA, 158 bp, synthetic construct
  misc_feature 1..158: note = Synthetic nucleic acid
  source 1..158: mol_type = other DNA
cagacgacggccagtgtcgacatgcaagcgcgagtgaagtgggtcgaagggttaaaacacttcttgcggcgatggttcctggctcttcgatcaaaagcggtgaatattactcactcgtatgaagtggttgccgcgaatggatcctacggtcattcagc

SEQ ID NO: 3087 - DNA, 158 bp, synthetic construct
  misc_feature 1..158: note = Synthetic nucleic acid
  source 1..158: mol_type = other DNA
cagacgacggccagtgtcgacatgcgtgctttaccgatctgtttagtagcactcatgctaagaacacttcttgcggcgatggttcctggctcttcgatcgtatgtatcggttctgcgcttaacattacggcgaaagtaggatcctacggtcattcagc

SEQ ID NO: 3088 - DNA, 158 bp, synthetic construct
  misc_feature 1..158: note = Synthetic nucleic acid
  source 1..158: mol_type = other DNA
cagacgacggccagtgtcgacatggcactgctgaatatttttgatatcgccgggtcggcaacacttcttgcggcgatggttcctggctcttcgatcgtgaaaagcatgatgctgaaaacccttacgctcggtcaacgaggatcctacggtcattcagc

SEQ ID NO: 3089 - DNA, 350 bp, synthetic construct
  source 1..350: mol_type = other DNA
tcgaggaattcagagaagtcatcaaagagtttaaagagtttatgagatttaaggtcaagacaacgagacacgagttcgagattgagggagagaaggcccctcagcggccttataactataacggtcctaaggtagcgaacgaacaaaccgctaagctcaaggtcacaaaaggtcgacgaggacccggatccctccccttctcctggtacggaagcaaagcctatgttaaacactgactatctgaagctctccttccctgaaggcttgagagattcatgaacttcgaggaaggacggagagtttatttataaggaaccaacttcccctccgatggccctgtcatgaattct

SEQ ID NO: 3090 - DNA, 80 bp, synthetic construct
  source 1..80: mol_type = other DNA
  misc_difference 22: note = ligation arm
  misc_difference 60: note = extension arm
cagacgacggccagtgtcgacnaacacttcttgcggcgatggttcctggctcttcgatcnggatcctacggtcattcagc

SEQ ID NO: 3091 - DNA, 350 bp, synthetic construct; identical to SEQ ID NO: 3089
  source 1..350: mol_type = other DNA

SEQ ID NO: 3092 - DNA, 135 bp, synthetic construct
  source 1..135: mol_type = other DNA
cagacgacggccagtgtcgacggtgaaggtcggagtcaacggatttggtcgaacacttcttgcggcgatggttcctggctcttcgatcggaagagagagaccctcactgctggggggatcctacggtcattcagc

SEQ ID NO: 3093 - DNA, 128 bp, synthetic construct
  source 1..128: mol_type = other DNA
cagacgacggccagtgtcgacatggaagaagagatcgccgcgctggaacacttcttgcggcgatggttcctggctcttcgatccccccagagcgcaagtactcggtgtggatcctacggtcattcagc

SEQ ID NO: 3094 - DNA, 18 bp, synthetic construct
  source 1..18: mol_type = other DNA
cagacgacggccagtgtc

SEQ ID NO: 3095 - DNA, 20 bp, synthetic construct
  source 1..20: mol_type = other DNA
gctgaatgaccgtaggatcc

SEQ ID NO: 3096 - DNA, 17 bp, synthetic construct
  source 1..17: mol_type = other DNA
aaatgcgaccccgaatg

SEQ ID NO: 3097 - DNA, 19 bp, synthetic construct
  source 1..19: mol_type = other DNA
ctatgggatgcgatgggat

SEQ ID NO: 3098 - DNA, 18 bp, synthetic construct
  source 1..18: mol_type = other DNA
gtattggcagggtctccg

SEQ ID NO: 3099 - DNA, 17 bp, synthetic construct
  source 1..17: mol_type = other DNA
gaggggtcacacctccg

SEQ ID NO: 3100 - DNA, 20 bp, synthetic construct
  source 1..20: mol_type = other DNA
cgcaaggaatctgcctaacc

SEQ ID NO: 3101 - DNA, 21 bp, synthetic construct
  source 1..21: mol_type = other DNA
attttcagatcgcgaccattg

SEQ ID NO: 3102 - DNA, 46 bp, synthetic construct
  source 1..46: mol_type = other DNA
ggatcctacggtcattcagcctccccttctcctggtacggaagcaa

SEQ ID NO: 3103 - DNA, 46 bp, synthetic construct
  source 1..46: mol_type = other DNA
gtcgacactggccgtcgtctgcttttgtgaccttgagcttagcggt

SEQ ID NO: 3104 - DNA, 19 bp, synthetic construct
  source 1..19: mol_type = other DNA
ggttcctggctcttcgatc

SEQ ID NO: 3105 - DNA, 18 bp, synthetic construct
  source 1..18: mol_type = other DNA
  misc_difference 1^2: note = phosphorothioate bond
  misc_difference 2^3: note = phosphorothioate bond
  misc_difference 3^4: note = phosphorothioate bond
  modified_base 18: mod_base = OTHER; note = uracil
atcgccgcaagaagtgtt

SEQ ID NO: 3106 - DNA, 20 bp, synthetic construct
  source 1..20: mol_type = other DNA
cttccgtaccaggagaaggg

SEQ ID NO: 3107 - DNA, 21 bp, synthetic construct
  source 1..21: mol_type = other DNA
accgctaagctcaaggtcaca

SEQ ID NO: 3108 - DNA, 46 bp, synthetic construct
  source 1..46: mol_type = other DNA
agcctccccttctcctgggatcctacggtcattcgtacggaagcaa

SEQ ID NO: 3109 - DNA, 46 bp, synthetic construct
  source 1..46: mol_type = other DNA
ttttgtgaccttgagcttagcggtgtcgacactggccgtcgtctgc

SEQ ID NO: 3110 - DNA, 52 bp, synthetic construct
  source 1..52: mol_type = other DNA
ggggacaagtttgtacaaaaaagcaggcttcaccgctaagctcaaggtcaca

SEQ ID NO: 3111 - DNA, 54 bp, synthetic construct
  source 1..54: mol_type = other DNA
gggaccactttgtacaagaaagctgggtcctaatcttccgtaccaggagaaggg

SEQ ID NO: 3112 - DNA, 508 bp, synthetic construct
  source 1..508: mol_type = other DNA
gagggattgggcgtcaacgggcagtaggatcctacggtcattcagcctccccttctcctggtacggaagcaaagcctatgttaaacactgactatctgaagctctccttccctgaaggcttgagagattcatgaacttcgaggaaggacggagagtttatttataaggaaccaacttcccctccgatggccctgtcatgaattctcatgtttgacagcttatcatcgataagcttcccatggataacttcgtataatgtatgctatacgaagttatggctcgaggaattcagagaagtcatcaaagagtttaaagagtttatgagatttaaggtcaagacaacgagacacgagttcgagattgagggagagaaggcccctcagcggccttataactataacggtcctaaggtagcgaacgaacaaaccgctaagctcaaggtcacaaaagcagacgacggccagtgtcgacatgtcactgtatcgccgtctagttctgctgtcttgtc

SEQ ID NO: 3113 - DNA, 21 bp, synthetic construct
  source 1..21: mol_type = other DNA
cagacgacggccagtgtcgac

SEQ ID NO: 3114 - DNA, 20 bp, synthetic construct
  source 1..20: mol_type = other DNA
ggatcctacggtcattcagc

SEQ ID NO: 3115 - DNA, 37 bp, synthetic construct
  source 1..37: mol_type = other DNA
aacacttcttgcggcgatggttcctggctcttcgatc

SEQ ID NO: 3116 - DNA, 25 bp, synthetic construct
  source 1..25: mol_type = other DNA
atgccannnnnnntgattgnnnnnn

SEQ ID NO: 3117 - DNA, 126 bp, synthetic construct
  source 1..126: mol_type = other DNA
cagacgacggccagtgtcgacttggagtttgcttccggtctggttcgaacacttcttgcggcgatggttcctggctcttcgatcgctattgggcgcggtaatgattggatcctacggtcattcagc

SEQ ID NO: 3118 - DNA, 144 bp, synthetic construct
  source 1..144: mol_type = other DNA
cagacgacggccagtgtcgaccctgacctgttggagtttgcttccggtctggttcgctttgaagcaacacttcttgcggcgatggttcctggctcttcgatcgctattgggcgcggtaatgattggatcctacggtcattcagc

SEQ ID NO: 3119 - DNA, 170 bp, synthetic construct
  source 1..170: mol_type = other DNA
cagacgacggccagtgtcgacggtactctctaatcctgacctgttggagtttgcttccggtctggttcgctttaagctcgaattaaaacgcaacacttcttgcggcgatggttcctggctcttcgatcgctattgggcgcggtaatgattggatcctacggtcattcagc

SEQ ID NO: 3120 - DNA, 134 bp, synthetic construct
  source 1..134: mol_type = other DNA
cagacgacggccagtgtcgacttggagtttgcttccggtctggttcgaacacttcttgcggcgatggttcctggctcttcgatcggcgaatccgttattgtttctcccgatgtaggatcctacggtcattcagc

SEQ ID NO: 3121 - DNA, 160 bp, synthetic construct
  source 1..160: mol_type = other DNA
cagacgacggccagtgtcgaccctgacctgttggagtttgcttccggtctggttcgctttgaagcaacacttcttgcggcgatggttcctggctcttcgatcccattcaaaaatattgtctgtgccacgtattcttacgcggatcctacggtcattcagc

SEQ ID NO: 3122 - DNA, 350 bp, synthetic construct; identical to SEQ ID NO: 3089
  source 1..350: mol_type = other DNA

SEQ ID NO: 3123 - DNA, 700 bp, synthetic construct
  source 1..700: mol_type = other DNA
tcgaggaattcagagaagtcatcaaagagtttagtgaggctcgtccatctgacggctgctcattggtgtggctctcgactgctagtgcttacggccgtagccggtcgatcgtacgtgcatgccctcccggtagtctctcgtcgtgcaagctgcctccagcttaccagattcgataaagagtttatgagatttaaggtcaagacaacgagacacgagttcgagattgagggagagaaggcccctcagcggccttataactataacggtcctaaggtagcgaacgaacaaaccgctaagctcaaggtcacaaaaggtcgacgaggacccggatccctccccttctcctggtacggaagcaaagcctatgttaaacactgactatctgaagctctccttccctgaaggcttgagagattcatgaacttcgaggaaggacggagagtttatttataatgccatgcgcaatgctcgcaaattggccggtaccgtacttaacccgagttcaagctgagccgtttcgttagcgtgccgcgcagcagctcgctcaacgaccctcgctcgtgcgcctgagtgctccatcttagcgtgtactggctaataaaactggtgcgccgtaaggtccgtgcgactgactgcctgtcaagcacaactgctagctactggaaccaacttcccctccgatggccctgtcatgaattct

SEQ ID NO: 3124 - DNA, 449 bp, synthetic construct
  source 1..449: mol_type = other DNA
nnnnnnnnnnnnnnntcgannctgnantgttggagtttgcttccggtctggttctctttgaaactctaattanaacccgatatttgaaatctttcgggcttcctcttaatctttttgatgcaatccgctttgcttctgactataatantcagggtaaagacctgatttttgatttatggtcattctccttctccganntgtggaacggaagtgagggggattcaatgaatatttatgacgattccgcattattggacgctatccagtctaaacattttactattaccccctctggcaaaacttcttttgcaaaagcctctcnctattttggtttcnncngcnactggtancngaggcttactagantgnnnntctgacaangcanacaaattccatttggcgttatgaattggcacctcnngcgttgagaagatgtnnaacctacanga

SEQ ID NO: 3125 - DNA, 846 bp, synthetic construct
  source 1..846: mol_type = other DNA
nnnnnnnnnnnngnncngcgtagatacntggcacacacaatatttttgaatggctattagtctttaatgcgcgaactgatagccctaaaacatcgccattaaaaataccgaacgaaccaccagcagaagataaaacagaggtgaggcggtcagtattaacaccgcctgcaacagtgccacgctgagagccagcagcaaatgaaaaatctaaagcatcaccttgctgaacctcaaatatcaaaccctcaatcaatatctggtcagttggcaaatcaacagttgaaaggaattgaggaaggttatctaaaatatctttaggagcactaacaactaatagattagagccgtcaatagataatacatttgaggatttagaagtattagactttacaaacaattcgacaactcgtattaaatcctttgcccgaacgttattaattttaaaagtttgagtaacattatcattttgcggaacaaagaaaccaccagaaggagcggaattatcatcatattcctgattatcagatgatggcaattcatcaatataatcctgattgtttggattatacttctgaataatggaagggttagaacctaccatatcaaaattatttgcacgtaaaacagaaataaaagaaattgcgtagattttcaggtttaacgtcagatgaatatacagtaacagtacctttnnnatcgggagaaacaataacggattcgcctgattgctttgaantaccaagttacaaaatcgcgcagaggcgaatattcatttcaattacctgagcnaaagaanatggatganacnaacattcangaaancaaaattaattaccnttaacaatt

SEQ ID NO: 3126 - DNA, 141 bp, synthetic construct
  source 1..141: mol_type = other DNA
cagacgacggccagtgtcgacatgtcactgtatcgccgtctagttctgctgtcttgtcaacacttcttgcggcgatggttcctggctcttcgatcgagggattgggcgtcaacgggcagtaggatcctacggtcattcagc
